United States Patent Application Publication US 2004/0265849 A1 - sequence listing, part 4

SEQ ID NO: 6808 - DNA, 114280 bp, Homo sapiens
aatacatatacctgctaaaggacttgtattcattacatatatatatatatatacacacacacacacacacacacgtacatatatgtatacacacacttgcatatatatgtagacaaacatatatatatgtacataacttttacaaatcaataaaaaatgagaaaaaagttgaagattgggcaaaaaacactagcaggcatgtcacaaaggacacgttttaataacaaatccatgagaagatgcagctttagtaattagtagtaaatacaaattaaaaatataagaaatttttaatactttacttacaccaaaataagcaaaatgataaagctaaaaaatatcaagcgttctagaagctgtgaagcccccagaactctcatgtactatagtgggagtataaattggttcattcacatcagaaaactttttgtcagtatccagcaaagttagacatatatatgtatgagtattcacatacgtatatattttagatacattccattcttatctatgttattctaaataatgtgtatacatataaattatgagatatgtactagaatgttcacagcagcattacttgtaaaggccaagaactggaaacaaccggaaagctaatcaacagttgaatgcatgatgatgaaatactttaaagcaaggagaatgaacagtctataattatatacaatattgataaattacatgcacaaactgttgaacaaaagaaactaaactatatcctatggtttgtacaaaaagtttacactcatataaagttcaatagtagtcaaaactaatccagaggtgagggtagtattcatccaagtgaacccagtggctagaagtaaacataagaagagtatgttggtgccagtaatggtctgttccttgatcagggtgacacattacgtttgtgaaaatccacgagctttgcacttatgtatccatgtagttttccaaatctgcattacatgtctaatttttatgccacagagtacgtgccacctaaaaacaaaagctaacttgctaagctctaagaggtagaattaatctttggtgaggtaaatccaatgcatgctgcattatattacctagctttccctgaacgtaaaactacagcgtgacaagatagtgcagtctgttatcgtgaagcagataaggtaaatgtggtccttcctcttacagtatgagccttcatgatgacaccaaatctatccagagacaaatgttcaagtggccgaggagcaacattcctagatctttctacctcctatagtcaaaaatcagaatagcaaaatgcatctcagtatttccctctactgtataaggaggagctaaatctgccatctgctcttcttttgttctgagctagatcatattcttatttcttttgattattgctcctatttatgctctgcaacacagatgaacttatagatgagaaagaagggctattattcccctagaaaggggaaaagcaaaatccatttagaaatatttcttaaatagtggtctgtggttgatgaattatgcatgcagtaagcagcgacactccagctctcataaccagaggggaaagctgcagtcctcactttccggctcaactgaacaggggccctggctgccagggaatgacaagtcatctcatttaaaaatcgtactctttcctgaaaaaccaaatggaagtttaaatcaggtaaaacgtggcaccctaggagctatctccagtaatttggcattgttacacacactcatacaatgagattgaaagcactttgctgtgaaaatgtggaaacctggggtcttagcccagtgctgtcacaaattagtcatttgaccttgctgtttacccagacagggcctcagtttccatatctgaaactaaccaaaatttagattaaaagatctctaggtctcatcttcctttaacaatctttaataagggaagcatacttttatagcaacatgtatattattaaataatttccatgtgagaggataattaagctagtaatattaagcttctcctctgtgttccagatgtgtaatagacgtttaacacaaaagtagtattatcgttgccataatccgttccagggttttctgtctagcatttaatgatgatggacatctttgaaaatatgaaaaaagtcatatgttttgcatattactccatattttgtttcacagatggatatattttttctcattagcattacattggctgtagaaaaggactgcgtggtttttagacacatgcaaatgctacttaatgagcacaccttattctccttccttgttttctggtattactaactagtgcggtaaccgtggacaaatcattcccttttcctatgcattgttttcccatttcacatattaatagaacttgtttagatccatgtttctcagagtgtgcttggcaaaatacgtcaatccccaaaatagttctgtgatcaaacaaattgggaagatcacatatttcatatcccctatattttcacctgggaagtaaccataaatattctaaaggccttaaagagttctgtgatgcagaaacctgctttatttcagagttgatctcaggttaatttattgagataattttttatccttggctgacagccattaataatgatccctcagatgaaatgatctaatcaactttcttggggatccttcaaacttgataatctctgatatggtttggctgtgaccccacccaaatcttatcttgaattatagttcccataatccccatgtttcgtggaagggaccaggtagagacaattgaattatgggagcactttcccccatcctgttctcatgatagtgagttagttcttaccagatctgatggttttataaggggccttccctttcactgggcactaattctctctcctgccaccctgtgaggagttgccttccgccacgcttttaagtttcctgaggcctccccagccatgtggaactgtgagtcaatgaaacctcttttctttataaatttcccagtcttgggaatttcttcatagcagcataagaatggactaatacaatctcctaggtttcttttggttcacatttcaatgtaatatggaaaggtggatatttctccaggtatattatttgtctattaaagtgggcttgatgtcaatgtttctggttctaaattcagttttgcaatggccattgtgtgacctgaggcaaaatcataatttctctgcgcctcagtttcctcatcaaaacactataaggatgttataaaataaaaaataaaaacataaaacatgtaaagtgtaactcaaaatcagatagcttctcatgatgtaaaaatgaaaacagagtgaagaactgagtttgaagccataataagtatgggaagtcttaaccccatatacatctaaggtaacctcagatgtgttcagtgatttttgaaatattagaaagttgaagtctgctttgaatctcaaatgagatagttttagggcaaaaaaaaaaaaagaacaaaactaaactattaagccctctgctccccttcacataaatggaagtctttttgttttttttttttgaaattgttactttcaagaatatgcatgccattcctacataaacaaccaaacaactatcatactataatggatcatagggattagagatatccatagaagaggaaggcacaagaattctcaaaggcagccagtgatgtttaaaacacagctctgacttctgagagctgaaactaatggatatcagaactgacagggcctccttggtgttctagacactctctttagtagaaactaaatcccacctataaaatccttcaaacatggttgtcaaagacaggaaatccttccacaataaatcacttttttctcttctaaagaggaggatatgctcttgtatgacccaatatgttcttatagaaaaagttacttgggtagaaaaacagctacagatactatctaacagaagacatcataatgactgattaaaacaatgcctgtctctgacacacctctgagaggagagctgtgatacttagacaaagcatatgctgctgcctgaaaatcactcctggtgtaggacttcaggtcattgtaagaaattttgatataacagaggctcaaatgggagcacttgtcaagttaatggattcctctgtatcccagaaagaacagtgaaggattcaataaaggttttatttttcccgtgctcttgcttcacacccatgatctctctcatctttagcggggtttggagagagagcctatacgtatatatatatcatggccctaaagctgcatctttgctttccacacaggttcccctttataaatctcacgttgctattttaatttccctgtgtgtctcatatttttatgagactaaagccccttgaaagcaaggggctttacttctctagttattctctcagcatttaggaggctggtctcaaagtttgagctgagttaaaaaaatacgtattatctaactccttatatacatatttagaaagagaacaaatgaatgaacaaacgatatgtgaatttatggagaaatcctagtttcattttttcagattaaatatctaacattttttaatgagatgtcaaactgtattggtcagggtttcccagaaaagcagaaaaaaatatatactttaatatatatatgatttattagaggaattgactcatgtgtttaccgaagctgagaagttccaggaactgccatccgcargctggagaacagaaaagctggtggtgtaatgaagccccaggaaccaggagctccaatgctcagggcaggaaaagatggatgtcccagctcaaacagagagagggagtgcatttaacttttctccaccactttgttctatttatgccctcaatagaatggatgacgcctgcccacactggtgaaggtaatcttctttactagggctaccaatttaaatgcgaatctatttcagaaacaccatcacaggtacacttggaagcaatgctttgccagttatctgagcaacccttaacctagtcaagttgacataaattaatcatcacaagcccaccctttctcaaactggcacccatacacatctccttaaactctacttcacctccaaataaagatagtaacagtcataattttgcttgacataatacaactatcctacattcaacccaaaccacactaatcccttcctcagaaagggtaaagtccttgggtcatgtttactattttcctgataatgtataaattaaatattatgctgtaagattaacaatgcctaaataacaatatatagtcaatacatcttatatgataagtaaataagaggaaggaatacacagatatttgcttaataattgtatatctctcaaaacaaggaagaaatattcatgacaattacagtcctcatgtctgtaactactcacatggttgtaactggtctttaaaactaccttcatttactacccattctgaattccctttgccttcagcaagtactgtagctcactgtttgtttgtttgtttacctggtggggtgaaaaaaacctttattcttgaagaatctgggtcatttgtagtcctgcctaggttgtggtggtggtgttttccattgaccttaaccacagagcatggatagtaacagacacgctaagatatctcctgtattccagacacaccctttcttacttccattgtggaacagtagtatgattttccaatggtagtttagatcaattaccctagccaacaccatagttctcttctcggcctgttgactcagaggcatgaggaacccaaagtggccaggtggcagtcttaactttaagttcaatgaactcgttattgttcgtcctcgtggaaacatttccccccccccggaattaagacccttagagcataaagccttgagaacacagagtgtaaattgtgttattgagtcactaggggtaatagtgtgttgccacccccattatcaccccttgattcctggactcatgaatcctggacatggaagaaacagcaccataaattggatgctgattcagagcatatacagccttctgcagaactttgccccagccctgaaatatgttgccaactagctagtgctgtaactgaagctccaaaaggccattccactgtactatcaaaccagctgcttcaggatggtgaagaacatggtaagacatgaatttcattagcatgagattaccatgcctcttttgtggtgaagtgagttccttcatcagaaacaatatgtgtggaatatcacaatggttagaagggcattatatatgttcactgatggtagtttttgcagaaacgttgcatgcagtgaaggcaagtctataactagagtgtctatttcagcaagaacaaaacactgttgctttcatgatggaagtggtccaatgtaatcagcctgccaccaggtagctggctcatcacccaagggactgttaccatattagggctcagtgttggtttctgctactagcagtcttggcactcagtagtggctgtaaccaggttggctttggtgagtggaagtccattttgctgagcccatgcattaccttcatccctgccaccagggccatttttttaataagccaactgggtgatgacagggttgtctggggaaagagaccaactggtatccatggaatgggtcattctgtccatttgattattgaagtcctcttctactgagctcacccttggtgagcattcacatgggatacaactttcacattttttgttcacttggtgatatctctctacctaaaccttccccaaatttgtcaccaatatttcaatcatgttttcccaaatatctgaccattcagctaaaccattggccacaattcatacttcaaaatataatcacaaatctggccatttctccttccaagaaaagtatgaagccagtgaactgttgaaagttttgcctacttggaagattctcctttcccaatgtcctcaaggatgtcccagagagggactctagtgctgcaactgtccacatttaggtagtgcctgtgtatcgtgaggaccatgaatactaccatctgtaaaccaggccttagtcttatcttcctctgttaactgatcatagagagttacccataaggccataagtgtaggttgggagagagaagacagtatggcaggagcaagaaccatgggcattagagacacttcttcatgtaacttacttcaacttcagggtctgctttgggctgaatgtgtatatattatttccatctaataatgaagtgttgctatgcaagctcagatttatgacttggtgggttagataacacccagtttatgatgggcagcttgggtcgtatagtagtttagtggactatggtcaaacatttagtttccactaaggcccagtaataggccaagaactgtctctcaaaaagagagcagttatctgtagatgatggcagggccttgctctaatatcctaaaggatcatgctgtgattcatctataggggcaggccaaatgctccaattggtgtctttctctgcctctgacacttcaggcaccactgaatttgctgaatcacatggctcaagaggcagagcacattgcagagcagcctgaagctattgcagagccttattttgttcttgggcccacttataatgagcagcttttcaggtcacttagtaaagagtccaaagtaatacacccaaatgagaatatgttgtctccaaaatccaaaaggcccagtaggtactgtgcctctttcttgattgagggaaaagcccgatggaacaacatatttttcaccttgaaagggatgtcatgacattcctcacaccactggacygttagaggttttgctgaggtagaaggcccctggatttcaattgaatttattttctaccctctgacatgcaactatcttaccaataagtctagagtagttgttacttctctcttactgggttcaatcagcatatcattcatgctacatcttgtaggaaaaaaggatgatcaagaaccctgcaaaagaaattctgacatagacctggagaatttatagatycctgaggtaggacagtaaaggtgtattgtgggtcttgccagctgaatgcagactgcttgtagtgtaccttatggacagggtaggaaaatggaattttccagatcaatagctgtatacaaggtgctagaatatgtgataatttgtgcaagcaatgaaaccacatctagtacagcagttgcaattggagtcaccacttaattaagcttgtaacaatccactgtcattctccaaaatccatctgttctttgtacaggcaaaataggaaattgagcacggatgtggtgggatcaccaaccctgcatctttcaaattctgcaccagtctctacagtccccccaggaatgcatcactgcttctgatttactattttcttaggtagaggaagttctaatggctcccacttggcctttgtcactacaatagcccttactttgcagttcagggaaccaatacagggtttctaccagctgctaaatatgtctattctagttatgccttaaagactggggaaataaccacaggatgcatttgggaactcactgggcccacggtgagatggtcctgatcaaaaattgtattgatcatatgacctctataagctccagctctggatgaagggtcatggtgatgttttagatgttccggagtcatgtcagagccagtgtccagtagtccttaaaagttatgtttacttcctttactccaattcctagttaccctgtttaaaaggctgtaggtacctttggggaaggttgggagaaatattaacagtttaaaataagtttttgttagtgtaccagcgttcttccttgagagagaatagccttgctttcactcaaggggttctgggtctgtaaatgccttagggcttagaattgactgagaggctttgactttgttyatatgatttgagttagacttttgttcacttgaacaagaacttttctgcttacargtcaagtaaaaattgagtgggcttcctatctatttcacttcgagaaacaccaggattaactagccaacaccataggtctgcatgagtcagattattctgattgctgcattgaatctgctgtccggtaaggaaactatgcccaactttcttttgctggttgggtgcctctgcttggcccctgtcactctgggatccaattatgcctattgtatttaggttttccagttgagtggctgcagttcttactgtgaggtctcatacagagaagaacattcatggactacttcaaggatgctagggctcctttcacaaatttatatctcaaaatttcagtgaaagccatgtcttctggaacctcctagtgtgggagagtaggtcttatatgacaaatctactctaattttccaatctctctaagccttagtatcccttcctctacattaaaccaagaaaggttaagtgtctttaattcattcactgtgagccatattttgatccatgtttcagccaactaaccagccaaactgttagagccctttttaactctctgagctgtaatgctaaatgaaaaatctttgtttagtgggcccatgtcaataaacttggtttgatccaactttaggctccttctactattattatatacccttaatattatccccatgcatgttccctagatttctgcttgtataagttagaaaattcaagttgttattttggattatggcatacctcattagaggtcatacattgtacctcacctttaggggcctgctagggtctagatataggtctagatgcaaagatgggtgttgggagtgggccaggagtataatcagcattgccttgcatggaaactgctttaggggaggccattaccattttttcagtcaatgaagggttaatcccctcaaataaatgtggaaagaccagtgtgggtggccacttcctctggcaaaaaaaaaaaaaagactatgtccttctgttttcctattttcttccttagattatatcctactagaaagcacaactatatctgcctcactcacccctgaattccagtaggaattggcttgcatgattatgaaagccagaaagttccacaatttgctgcctgtaatctggagaaccagaaaggttaatggtgttactcactctgagtcccaaggcccaggaaacagaagcaaggatgtctgaggacagaagaagatgaatatctcacttcaagcagaaaaagaatgaattaacccttcctctaccattttgttctattcaggccctcaatagatggcctctgcattgttgagggtgacttttttacccagtctaccaattcaaatgctcttcttttccagaaacatccttatagacacacccataaataatgtattaccagctttctgggaaaatcttagtccagtcaagttcacacataaaattaaccatcacacaaacatataaagaatacctttgtaaagaatagaaggcattactaaacttaccactttgacacttagattgagaatatctgtatatgcctttctgtgtactcagaagtaactattatagtgatcttggcattttcattaccttctattgyttccttacagatgtctaaggaaataaattattgttttggcatatttttaaaatgatatgataatgaatgttatacattcattaaattgcatttttctgtattcatatgcaacttgccttttgcagtcaacattatgttaggaaataaaatcatgttgatatatatgtctattctggatgctgtggtacgctgttcagatttccttttcaggatcctcagaacggagctactcattccttcagcagctggctgttttggctgctgatcactctctgctgagaccctttccaggcctttccttccagattcccttagctaaagggatctgccttgttccacgttacacctccccagtagcaactgtccaatgactggtgggtgaaattacaaatatataaccccctttcctgattttggatgactttgaaaagttatccctatttcagagctccacgtaggatgagctgagctctttgctctgactgcatcgccgtaaacatctcctgcccagtcctacctcctttattccttcataggtgttgttcccaaaagcaatcactcataaattttcttggtacaatgtccgagtcagagactgttttctgggaacttggcctcagacaatgctttctacataagttgtttttactgctgaatagcattctattgtataaccatattacaatttatttatccattcaactattgatgggaatcaagattgcttttaagatatttaatacttatagatctttctgtgtgcatatttgagcagaattagttaagagtaaccctacaaacgtatttgttgagttataacttttctatcctaactttgaaaggaactatgaggaaactccaaaattataaaatttgcattactctgaatcttcatatcaaaaacttccgttttccaaagtagctcttgatattttgggcactgacttctatcagaggatattctttcctgtcaaacttgccttagcattgcttctcaatgctcttaaaaaatctttgatgyctactcaaggacaagggccctgttcctcctggatccaataggattcctattcttttactacagttgtgtgatctgaagttattatagtttcccagtgtccaacatgtaagaattcctgtttcttaactttcaactgttcagagctttttcattttacacacaagttctaacataattgaattctgcctttaagataaaaatagattgtgtttatctaaatactatctatgttaacataacttttggggatctaattcatatgctcctattcctcctgtgttttgacatctgtaatatcctgttcgggggatcataacacctcaagcaataacattgctgtttagattatctgattcatgtaacaagctgggcttcaacttaggtatgcttatctttgagttattcatattctaatgtttacaatacagtttattaaaaacaatttgaactccatagtagtcaggttatccttgaaagaaaaacatatgttaattgatcatttaagaatttactgcctaaaacagagccttctgtctcagagctgacattattactgacatttttttctttattaacagttaattttgtctccagcattcttgtacgaatgggtaattcctacaaataaagtaggaatttatagagtttgaaaaaatgtttattgtacatttacatttctatgtatttatgctagctttcgaataagactttaactttgcttgtaattttgtgtgaaatttaaatcaatgtaaatgtgaattaaacaagccatttcctttatatatgacttcactgagacccagagtgtagaaacctcttttcctgtttcactagggatgtagtagatgtaggaataggactcaattccactttcttgtgtcccatagtaactcttctgactttctcttccacttaaatataacaagaaatcctgtgatccctagaatgaaatcattttacttcataatatggaggccaagactatccagtttttgctcttgttgggttccttccttgcctgggatgtctctgctctgtatttgtgactgtctcacatgagatggaagctcttgcatacagaaatagctttttgtactatatggataaagagcaaaatgtaaaaaaaactctgcagttttcattaacttatattacggaaacacttatataacattttgttaaatatgctttttctaaggagaaataatcagacatatcgattatggaataagaaaaacaaaaataaaaaagctttcaacaactcatgatcaggaaataggacatacagaatacacttcatttttctgactccagggaaagctcttactgtgacatcaacctctaaatattttgattgagctgtcagtgtagagtgttgtagtaaagttaacatttcagaaacagataatctagagtctttatgccaattttaccatggatgagctacgtgatcttagacaagtcaccttagctctctaattattaggttcttttactggaaaacagggaaacataccatttactttaaaatgcctggttaggattaatgacaatatataaaaataagttagcccaatgcctgrctcataaaaatgcattgataaatgagaaatatacctaaaatgaattatgtgaatataattattttaattatttctatgcatattataattcttgaaactcaagtacaagcaaatattctctcttcattttttttttttagatagagtctcgctcatgtcacccaggctggagtgcagtggcgcaatcttggatgactgcaactcctctcttgggttcaagtgattctcctgcctcagcctcccaagtagctgggattacaagtgtgcaccaccatgcccggtaatttttttgtatttttagtagagatgaggtttcaccatgttggtcaggctrgtcttgaactcctgacctcaggtgatccactcacctcggtctcccaaagtgctgggattacaggcgtgagccaccatgcccagcctaatattctctactcttaaaacctgtagtgcaaggggccatttctcaccttgagaaaagggattcaatggactgaaagagagacatatcccatgtaagcaagaaataatgaatgtgcagtccccctgggaacactgaagggaagcactcacatggtattgtcaacagaagccagtgtttgactagggagagttcagaagcagtatccaacttcctctcagggtgactcctacctttcctgaatcaaagcagcaacctgacctgctaggaccaccaacacttctcctgtaatcacactgatgcccacagggctccacagaaacatcttccacacattcctccctgcttcagtgtctatataaatacctggatcctctcactggccacacttaagagtctttgtacatggatgcttttcctgtttttcctcttttttcacttcattgcctttgcctcacctttccccgccttcacaattgcacctaggktatacatactatgtagagacatagcaggaaatcaggaaaccccgaagtgaacataaactcagccaagaaaatcactagggactgacagcagtgacaaggcagaatttgctcacattcaggaatgatatattcatttcccaccttgcctgcccctgctgtgatttttctggggcacaattcacagccctgagaagggagatgctgttttcaacttacaggaacccacggactgctctcttccacagactccttggctgtctcctggccctcagtttggagcagatggagagcctggggtatttctgcatatttgctatgtgaggtcctcacctactgagagcttctctcccatccccaccatttcctcccactctttagaaacaagacaactgccttaagacccaatcattttgttttcagaaaattttgccgcttcacacactactgcctaattaatgtttccgtaaagggcactgaacttggtttagggtatctgggatggaactaggctgtcgctcacttgctccataatgttgggaaagttattcagcctctctgatcctccatcttctgactgttgaaacacagataagctctcacccaaatggtagttgggaggggtatgaatgatgtatatgaagatgccttatatataagaattgcttcctgaaaattagccaaagttaatatcatgtcattcttctgctcaagagccaatagtggctccttattccttaaaggtatgggcccaaattcatttgccttctgtcttcttacacaggtatctgcaaccccagattgttcttatgtggctgtggctctgtttcccctttcatgtttctcaagtgtatataaataatatacatattactttccattggctgatcacctttttctgtcttgcatgcacaatgagctccctttcccctcattacgttgactgagattctccctacaggtctcaccttcccatatgtttattgataaaaaatgttacacagccacagaatctgatcacttccgtaggtggatgttttgcagatttaatcaccaactttgcatttactcatctactcgttcagtaaataaccccaagaacgctgtgccagacacactgtttgkaattcagggatgaataaggcagatagagttgtgctctcaartagtacataatcagaggaagaaaatagaaaaaatggacatagagaaaattgcttaccttgacagcaagcactggcttctctcttgatgagagactgatttgttgagtcatttaagttaaaacctatgtgtagaaggcaatgctctgagtatctgatgctaaatgttggtaacctaaatttataaaggaaacagatttgagtttccagggcagccttgaagggagaggatgaggagcagacatggtacagagatgcagacacccttttctgtacatgcagtccccttcctctgatttctcccaaaatatgtagggaagtatattttactgtaaaatgtgggtagtgaatgctattaccttggatgcttatgctgctggtctgaggaccatactttgagaagcactattttctgaaggagcacaagactgtttctaaaagggtgagccataataagacttgggaagaccatcaagataggagacagagctggcttcagcaaatttgtgaaattagctgagttttttttttggttccctaaggtttctataatcattattgcactaataattgttcagtaccctatatttgttcgctgaagttccagaagtagcataggaccaaaatttatgatttcaacatggcatcttccaaagtttccatggcccctgtgatttgcttttcaccattggcaagtgcaaaatatctcataattatgttcccatccagtctttaagatttgatccaaatttccatgacacctctctaaggattatttgtgtttaacacaaatacatctgagatattgagatagagattggagagagatatttcaaggaatgggatctaggtggcaaaggattcaggccatacagacaaccacttactaacaacttctgtccactgagactcacgcatgttattactcagcacgaggtccacctgttagtgaaatatacttttcttttatgacaagccatacctgatatgcttgcatacacacagactcataccacatacactcacacaaattaacacacacatagtcacgcacattcatactccgcaagaaacaaagccaaaaattaatcctgcttcttcttttggttgattctgcccgatttgtgccaggggagatcaggtctaaatatatataaacaccagagcttctcagttcaattaaatgtcccttgcacaccttaatttgagaggaaattactgtaaatattttatttaaaatttaataattttattttgttttatttttattaatattttgttaaataaaaacatatttgttagatcttggattgtaagcatgttaaagctagaaagttagcaatatttaataaagtaattgtaggttaagaaactattgtccagtaaataactgttttaattaaaacagttaaaagatgtaaaagataactttttaagtaggaatacaaaaagggtttattaaaaattttactggaccaaatggatgtttcaagttttaggagacagaaatacagaaaccctaagtatatttcattttatatgccaaaagtttattttaaatagcagcaaatagtgaagttggggaaaagtctgctatgactggattatcgctaacatccttggtgtagcactaacttgggtgtcagtgcacacaaggctggtgtctgtactttttcactaccttcttctacaatatcaccctcagctttagctggggattaatatgtttttatatctatcctcattgctgccaccctargtaaagccatcatccacttcygttggcactagtctcatttccttctagctggtgtcctgtagctattcttgcaccctgtagctcattctcctcactggatttagagtaactgtttccaaacccaaatacaactgtaggagaatgagctctttaaaaaaacaaacaaacaaacaaacaacactcaatgacttcccataattccttaggacaaaagtctatatctttaataagcaataacctctccaatattcaatattgttttatccctgtctccttttgtattttgaaattgcacaaaacccttggggatccaaaaactggtctttttttcagtgtctaagagaccttgttccagcctcctgtgcaatgcttgacctttgtaaacacctcacctgtgccatgaatgcttttcacatatcatccccatctacccctttatctattatttcctctttattctttagatctttgttcagtcattccttcccaggagaagctttctctgagtctcttacccaggycatatccccaatggcacactctcagaacacatgtaaaatactgaatacaactttaatttgacatctttatcctctgttagactgtagtcactatcaatgcaagcacatgtctgtcctcaccattgaatcccatttgcttcaaggacgggacacagaaggaattgaataaagtcatggaaaatgaaactcaggttggtcttctcactggcttcttaaaggaatgagcacattgtgatcctgctctgtatcgtggagaaagacccaaggwaagttcccatttccagttaagctcagcctaacctctcttaatagctattcctagttctgccattcattaactcaacttatactttccataaacatgtgtaacaagtatctgtactcctgttctatgtgtaggagacttcccacctcataagtattgaaagaaggcagaatttacttcccagtatgaagtgaagatgctagctactcccttttccaacttctcctatagctaggatgcagggatgtgatctagactctgcaaaacaagtgcactcatgtctactttgatttcaaagctagtgaggcaaaaaaaggtaaaacacaagaggtggtggagctcatgttggtgaagatggcggcaggaaaaaaaaaagcatatccgagatccagaagcagtagtggtaacagttcactcactcttaggtacctgggtacagtggtaacatcatgggacatgtggcatgactttggctatttttttttctgtgtggtgtgcaagcatggcttttcagttctctacgaaatgcattgaactactcaatgtcttagtaaattcactttctgctcaaattaggcagagtcagtgtcttgtaatttcagyagaaaaatctaactcactagcctcatacatatagtctgaaaagaaagatatgcaagtaaatagtcaattactatgtaakgttactcaagggtttattaaaacctatttacaaatggtccatatgtcttgcctataccaggtcctaggacattctagattccctacttgcttgccaacaatatttatgggaagcagtagttccctgaaaaagcactctcaacatgaaataagatttccttttatttgcaacgccttgcctcagaaggcacctgctgtttcctagaggtgagaattcagtggaaaaacatatatgtagtcatattgtttgtcataaaacctctgtgctacaagggactctaaaaatcaccccaactaaacccagttttgaatttcctttccttttctgcaatgcccaagtagccattgcgctttggctttgaatatctatagtgacaaggaacttgcaataccacatcaaggaaactctttcatcgttgaacagtcctagatttgaaaagttagttctcaaattagctcaaaatacatttctatccactttgttgatacagaataaatctattcccttttcctcagtttgcaatttatatcatttgtcatgttattttcctacatcttccttttcagtccatgttaaaataacagtacaatgtagagctttgtttgctcccagttaggatgtagaaagttatcaaaagccatcactccttctttaacaatacaaaagcctgaataaacgaaaacaaaataacaccttcttttaaagccattaaagaatctcagacacaaggaacttaaataaactaaatttcaaagaggatcagtctattcctaggtgagcaaggtccattggctgcttttgtgcttggaattagttgcctattctttttatgggtaagtgggagagcaaacctacaatatgtgaagagagttttccggtacaaggagaaatcaggaaatttttaatgacattatgggttgttaagtactataacagtgcagacccttaaacataaaattatcgctcctcatgatttttatatcttgtagtgcttcgatctcaaaggcctgctatagagaagaatggaactcatcctcaaaacattcaaaagtgaagttgaattgaaactaaataaagcttcaggttgccctcttcagattagcaactgattaaaattaagtgattagcccttccccatagctgcctgacataggaaaaagcatgaggtctctggaaaaacaacatgtatattgtctacttcagtctctaatgttttataacagtatctgccatacaataaaaaataatataggataaacaacaaagcatagaaatacaacccataatcaagaggcaaatttcccaataaagaaaagaaaaatcaatagaaacactcaaaaacaacctatgtattaaagttacaggcaaggaccttaaatgtatcacatatctgttaaagagtctgaagtgaaaaatagacatgtgggagcatatgggaaattttgatgaaaaaatgaaaattctcggcaggaaacatatagacattcctgaatttgagttataaaaaaccccaacatctaaaattaaaaattcattagaaaagattagcagcagaatgacacacaagaggaaagatggttgaactccaggataggtcaatcaaaattatctaaactaaaaatcaaagacaaaaataaaataaaataaattaaaaacagaccattagatacctgcaggacaaaattaaatgatttaactccataaattagagttgcacatggagatacattgaagatataacgaaaaaaagcattccaaagtaaagaatgacatcagcccacagatctaagtactcagtaagccccaagctagagaaatacaaagaaggttacaccaaggtaaatcaaaaatttttttaaaaaattgtaaaagtggccatagaaacagaaatatattacatttcggggaacaaaaataaaaatgccatttgatactttattgggaacaaaagacaacaggattatttctttaaggtgattttaaaaacttgacaatctagaattctatatactgttgagagaaaacaaagctgaaataaaaataacttgatataaataacagcttaaagaattagatgccaggagacccatatgacaagaaatgcaaaaggatattctttaggtagaataaaatctgggtagatgaaagccaaacctttatgaagtaataaaaggaccacagtggcaaatatgtagtaaaacatcattttaaaaatttatactgacagagtgagtggctacttaaagccaaatgaaacttcaaagtattacagagttcacaacacataaagaaatacaaggattctgctttctccatatgctcaccaacatttgttattatttgtttttgatagcagtgatcctgacagatataaaatgctatctcatggtggctttgagttgcatttccctgatgtttgtacattgttggtgggaatgcaaaaatcatgcagcctatatttaaaatagtatggaggttcctaaaaaattaaaaaatagaaccaacatatgatccaacgttcgcaattctgggtatttatccaaaagaactgaaattaggaaactgaaaaattatggaagttttagtaaggtataattgacatccagagatctgcacatattgaatatatacaatttgacaagtttagacatctacaaacacctgtgataccatcaccaaaatcaaagtaaaagacatatccaagataaccaagtttatgctgtttaaatgaaacacatttggagccttatttatctcttgccttgatggtttcacctgtgtcctaccatgtctcagtagaactcctacactcctgttgctgccagattacttaatttagtcaattctttctcttattatttacttacaaatgcaaaaggtattgaccatctactatgtgccaagtactgtgctggtcatgggttatacaaagtgaaaacaaaaacagaagtccatacgttcaaggaacttagaatctgcttaaaggaaagccccaagactcattaggcagtgtggtgggaggctaagaacctgaactctgacatcgaaaaaatcttagttccacacacagcctattattagccgtgtgatgtgcccaacttatttgcacctctataagcgtcagcttgctcattgtaaagttatttacttcatgtgaggataaatgagatatttagtacagtgtgatcttgtaggaaatacttaataaatattagccattgttgttaagtcaaataatagaagagtattctgggtattgtgaaagtacagtggcggggaagatggtaagcaaggagagtcagtattcagcgcttggcaaaagtcagtttccacactgccgttttaatcttgtcttcttttttatttgaattttctattccagtcaggttgctcagcacacaacttgtgcactctccataagatatttattaaaacctagtttccttgtctggaaggtgaggaaggtgataaaaatgtctctctcaaaaggttgtcacaaggataaagtgagaggatataaaagttaaattaaaaaactatacaactctttattatcatttcttctactatgatcactttgctcaaatgatcggttttaactggaaatgactatctattcttgattattgaaattctaacaattactaaaataaacaaaccaaccaacccaagcaaccaaccaaacaaacaaaaataagacaaaactccattttgtgttttctaacatggttygattcaagttcttctacccttaagaaacccttgtccacctcatctcctttttattaggtaaaaaatttaaaccattttattacattgacaatataataatttatgtgtgtatgtttcataccccttctataacaattaaattcacgggctgtaatgaaagactgggttcaaacctcaaagctttctcttaaaagccagttgatttgagcaaattatttcagctgtatttgtctcagctttctcataaggaaaacaagcatactaacagtgcctattccataggtrtaatacaaagactaaatgagttaaaacaaatggattgtctagaacaatacctcgcatatagttcacccaataagtaataagccacccatattattattgaaaaaaaagactgcctttttcctataaaatgccaactgctagtcagtttcaaaattataacccgtaagataatggtttctacagcccaaacaattctccagcctcttataacttatttcctcccctgttaatccagcaacagttctttaagttctgggaatttcactgtatcctcctagataattcccctcccccaccacttggtctaatgyggatcatctgagacatggtaggatcccgatgaagccatccaggcaggagatagatagagctccaagtgtgctttatttaagcagcataaacttggttatgctagatatgtctgttctcttgattttaatgctggtatcacaggtgtttgcatatgtctaaactcatcaaattgtatacattaaatatgtgccgttctttttatatcaattatatctcactaaaactctcacgatttttcagtttcttaatttcagttcttttgggtaaatatccagaagtcttatttctagatcattgttggtagtgatttttgaaggaagcaaaaataaataaataataaatggggttttgattagttcctrtcctcagtaaaattattccactttggacaaatacatctagcagccaattgaaaaaataatactattctstaatactttaaatagctatcatgatattgcttttgtatccccatggaaaccttcaaagatctttcaaatacccgccaaaagaaatgaagtgtaaattttaagctaactttccacctttagactttataatcgctacagattcctcaatcctgctaagagttagtatctaccttggcttcttcctgggagtcagaaggggctgtgctccagtcagtgaacattagcgggaattacctcaatttccaccgccgctggacctcaccaagatgctgtctgtcaggccagtaaacattcctggcaccttcttctggccctaagactccccagaggaaagcaaaacaaaacagtctttccctcctatcctgtctcttattctacagaaccagtaccttcattggttaagttcctacagactttgactaagaaaagtaattttctttaatgaccttcagccctttctctcagtctgggaggcaattttgatggggttactctggtagagtaattaagccagattttcatctgtcactaaaatgttgccttggtatttggactgatgtgtttggaatgggtttggtttcaagctgtgaacttaaaatgcccacaggttgcactacccaattctctaaaaataaatgtaccctatattagtcccacaacattttccattgtgttaaagttcccagagttacctttggtaggtgttgcaatcgtcactcaaaagggttttgaagcttctaacgttaaaaaagacagagactcaatggcaaagtcttttttaattggcctccctcttccccatcacttccaaagaaaagtaatagtgctgaaaggatttttacatcaatagaaaattcttcaaagatttcatactgattacactttactcctacctaattttgaggggtaaggtagcttatttgtctcctgcaaaccagcatattataacaagaagcaatttttcactttaaaaagtagtcatggtggcagtagtggtggagaaggaagaggagagcgaaggagaaacagatatcgctttaaatatctcctctttagatttattattttttcctgggatagtaagaaaattatttttgagatttctgggcataattgaatgagttaagccttgaagatgccaaagaaaatagttcttatggtatctcatctctttgttttcatattgatttgttcattccttaatttagtcacaaaatattttaagtgctaactctgacccaaactctgtataggaccctaggaaagagtagtaaatgatttacctgtctttctcgttcatggtttaccatttaattatatatatataaacaaaacattaacaaaatgattacttgtgatctacattaaaaaggaaataaacaagatgctataagagaatattgagaagcttgggtaggaatatggcaaataccatccagtaggaatgttggttcatatcccttacttgtacatctctgaaataaaccatcccttcatgaaattaggaaataagtgttgttccctgtgaagaggtagtaacttagcagaatagaatgtgtagaggaatggccaataaaagagatgcagagcagaaaacttcctggccttcctatattcttgaatgtagttaataatgtmcctgatcatgctgattcactggcaaggtttggagattcacattttaaaataccatatatatctagttgttgaactgattgcagcttctagtgcctgagagactttctgctcttctcttgcatcaagaggataggtaaaatgagaatttatctcatgcctttcttatgaaagcccatttgaagtaaaagttgtacatcaactctcagatcaraatggctacttctgcttctgagtaatttaaataacctgtcaaaattgagatttcccaagtccattttgtgttcagaatttgcaggtaagctcctcaatatcctggcctcttatctcagtaaaaatatgcccagaatttctagtactttctttcttcattaaccccacaactttaattacaaccaattacctagcattcccttcctactcgcagtcatggctctgtatggtgtggcaaaacgctgttcaaaatatatagttctattaagcacctgacatgtgccaagaattgtgttttttgtatggaacggatagagacaaactagaaccagttcctattcttaaaaaattcaaatgcgagtgggaatatagactctctaaaatatattcttaatgttgtgtcgtatatttactatttttttctatttgattgtaaattctgtgtccctgaattgtcattcctaatagtactgaacccaggaaccctgtgctcaataatcgcatgtgtggcctatcctcctgtgaattatgctcttcccagacacatgraagtacacctttcagaggctgatggttatcattctttcctaaagaattgattgtgcaactgacattcactgagggcttgattctcctcgcctcagagctataacccagttacttgttggattcattccaattctcttccctcatccattttccactctagatttttatttaccaatgcagataaaggttatgctttacagagctcttctagctttacagttaacttctcaaatccattttcctgtcactgtttgttaattcaccaacgtattccttttaaaaagtagaataaaaaaatatgtttattttcatcttattttacaagaatctttgtagattgccctttgagacttgattcatggatccaagatcacctgagacgcaaaactttcctggactttctgctaataattctttgtggcctttatattattttatagcgactctatgtctgtggtgggacatattaaaataaaccaggacatattaaaataaaaacaaagttggatgaaggcgcataaacacatacagctggaagcatcctcagggactattccccaaatcactcattttatggagaaaaaacccctgaaactcagagatttaagacattgactacagctacacaaaaactcagggaaaagtttgaccagatctgccttcccctactgtgaatctctaatttgctttatacatcaccatatcaggatttaaatttcctttgtgccgtttatgaggtattgtgtatagaagaattgggaagaagaagaggcgatgtttagttttgattctgtggttaaaatagaagaatccaaggaggatctgcgaagtgtttgaagaatgagattctggatttgtatgttaaaaatagaaaccatgggccaggctcagtggctcacgcctgtaatcccagcactttggaaggccgaggcgggcggatcacgagattagaagatcgagaccatcctggctaacatggtgaaaccccgtctctactaaaaatacaaaaagttagccgggcgtggttgcgggtgyctgtagtcccagctactctggaggctgaggcgggagaatggcgtgaacccaggaggcggagcttgcagtgagccgagatcgtgccactgccctccagcctgggcgatagagcgagactccgtctcaaaaaaagaaaaaaaaaaaaaaaaaaagaaagaaaccatgatgaaaataacaacagtaaatattgtttatcaagaccttatttaagccagtcatagagctaagtatttaacacatattacttgactttcacaaagccctatgtggtaggaatctttattagtctcatttcactgaagaggaaaccaacactgacagaaaacgtgccaagaatttctcatcaagcaagtggcacgaccttgaacatgttctgagtctgagcacctggttgctcaatgagaggaaggggagaaagagagcatgcgcatgggctttctgttttcagccatacagaatctaaatgggtaatgaaatttgacatcttcccagttaatccttggttattctgatgtgtctcattaacgggagatttgctgcagaatgtcccattctgttaaaaaaaaatacaatagtttgactctcttctccttagatctcagaattaaagaatattttagagtcatataattagacaatcagcctctatacagcccctacttaactgtctctcagatgtgggtgtgttttcaagtctcaaaagaaagaatctatttttttttttttgtctagacttaagcaaatatccccatttaactaaggaaaaacttaaaacattaaattacttagtaacatctttaacaggttcagcatacattcagaaggtagaaaaatatatatttccttcaaatgtttaccataattgtgaattgtttgtataatattgatatattctcttaatttctaagatggtagaggtggtgtttgtactgggtaaatgtccagcattctcttctgttacataaatacctaagtacttttccatatgtcaagctctgtgttccaaacaacttttaaaaatgcttgcattgctaaaaatgaaaacaggaatgagggctacaggttactaaagccatttgaagcaaagacacaagtataggctatagtttccatctaggaacttgaaataccattggtgatgagtacaaactctgatatctgatatcaaatgtatctcattctgaatcccagtcaataattccattaaattgaaatgatctgaacattccaatcaaaggaaagagattatagaacttcataaatagtatttcccaaccatccattgtctataaaaatggagtttaaagataaagccatagaaaaaaagtaaaaggatggaatgaagatgtataacatgcaatttttaattataagaaaactggactggctatattagtatcagacaaagtagactttagaaaaagaaatgttactggagataaagaggaataatctcataattatgaaagggttaattcattaagaagatataatttttctaaatagtatgcaccaaatagagcttcaaaatacataaacacttgtatttaccaaaagtcttatgcaaaaatatttacagcacctttatttatgtatatactttttgctgtgctgtaatcttttatttcatgcttgcaactataaatttattaaatcaatcactagtgctacaactacagatgtatagatatattaacaacttaaaatcggtttactttttttttcacctttttaggttcgggagtgcatatgcagttttgttatataggcaaagtttgtatcaaaggggcttagtgtacaggttgttttattacccaggaaataagcacagtactaataggtagtttttcaatcctcaccctcctcccaccctccaccctcaagtaggccccactgtctgttgttcccttctttgtgtccatatgtactcaatgtttagcttccacttataagtgagaacgtgtggtattaagttttctcttcctgtgttagtttgcttaggataatggcctccagctccacccatgtttttgcaacggacatgatctcattctttttttgtggctgcatagtattccattttctttatccagtgtaccattgatgggcatttaggttgattccatgtctttgctattgtgaatagtgcttcagtgaatgaatgcatgcatgagtctttatggtaaaatgatttatattcctttgggtatatacccaataacgcgatagctgggtcaaatggtaattctgttttgagttctttgggaaatcacccagctgctttccacaatggctgaactaatttacatttgcgccagcagtgtataaacattcccttcgctccacaatcttgccagcatctgtaattttttgtttttttaataaaaattattttaactggtgtgagatgtatgtcttcgtggttttgatttgcacttctgtaatgattagtgctgttgagtattttgtcatatgtttgttgggcacatgtatgtcttcttttgaaaagtgtctattcatgtcttttgtctgttttttacaatgaggttgtttgtttkttgcttgtaactctttttaattccttgtagattctgacctttgttggatttttgtctgtttttttttaacgaggttgtttgttttttgcttgtaactctttttaagttccttatagatactagacatttgttggatgcatagtttgcaaatattttctcccattctgtaggttttctgtttactacgttgaaaaagagtttcttaattaggtcctatttgtcaatttttggttttgttacaattgcttttggcatmttcatcatgaaatctttgctaggtcctatgtccrgaatggtatttgctaggttatctttcagaatttttatagatttgggtttcacatttaagtatttaattcatcttgagttgatttctgaatatggtgtaaggaaggggtccagtttcaatcttctgcatacggagaatcagttatcccagcatcagcatctttatttatgataaaaagctgaaacagccaaatgtcaatagattaacatttgtgtatattcatacaatgaaatacatttgaggaataaaaaaggtatgaatcattgatataagcacaaatgtacatcaattttttttgcttcttcatatgtctagtaatttttattggatgtcagatgtttttaatgtcacattgttgagtgacattgttgagtgacattgcttttctcatcttctttgaaggtactttggggtttttttcaggtgtcagttaagttacttgttgaactacttgatactctttagattgtttttatgctatgttaagtcctaaagagtaatagtcatactaggtctagtttaatccacttcataagtgatgaaattgttggcatctatgaataacctgtattttgaataagtttcctttatctaatctggctgaatgtgagcatctcttagctttgtgtgagatttagaaagtttttttgagctgacagctctcaggtagttatcatttttaccccagaaattgttcttgttcatcctcattttctttaatcttacatacttgctgcttagtttttagacaaagactcaagaagtctcttatagtaccttcatttccagccacctcagtacctagaactgtaatttcaactcaatgagactactgcattctccttagcctttctacccatgcaattttgtctggaaagtgttcctaggtagatagcctggggttaccatagggctcagcttatttatttcttctttctcaaggaacagagccacacagtaatattgctcaatgccccaaaacagctgtttcatagattttgttcaattttctaacttaaaatcacaggatgatgagaagttctgcttttggaatagcggcatcaacagctacatggacctgcttctgggaaaaacaagtgtaactggtaaaatttctaatttaaaaagagttaaagttttggaattgtcttaagagcatacaacaaatgaagaagcatttttattttttatttttgtgagtacataataggtgtgtatatttatggggttcatttgataccttgaggcaggcatgcaatatgtaataatcatattatgggaaatgaggcatctatcacctcaagcatttatccttttgttaaaaacaatccaattatattcttttaattatttgtaaaagtacaattaaattattattgactatagtcaccctgttgtgctatcatatastaggtattattcattctttctaatgactttttatacccattaaccatccccatttcctttccaccctccctactactcttcccagcctctggtcaccttccttctattctctatctccatgggttcaattgtttgaatttttatctcccacaaataagtgagaacatgtgaagtttgtctttctgtgcctggcttatttcacttaatgcaatgatctccagttccatctatgttgttgcaaatgataggaccttactctttttatggctgaatagtacttcattatgtataagtatcatattttctttatccattcatctgttgatgaacattgaggctacttccaagttttggctattgtgaacaacatgagagtatagatatcttttaaatatactgatttcctttcttttgggtatttacgtagcaaagggattgctggcatctctatttttagtattttgagaaacctccaaactcttctccatagtggttgtatacatttacattcccaccaaccgtgcgtgagagttccctttttccccacatccttgccagcatttgttattgatttcctcttggataaaagccagtttaactggggtgagatgatatctgattgtagttttgatttgcatctctttgatgatcagtgatgtcgagcacctgttcatatgcctgtttgccacttgtatgtctccttttgagaagtgtctgttcagatcttttgcccatttttcgatctgattattagatttttctccaaaagtgttgtttgagctccttatattttctacccattaatcccttgtcagatgggtagtttacaaatattttctcatgttctgtaggttgtcttttcactttgttgtttgtttcctttgcttttcagaagcttttaaacttagtgtgattccatttgtccatttttattttggttgcctgtgcttgtggggtgaagaaacatttcttaaaagaaaatccattaaacctcagtgagaacagcaagagtctgtgtgatatgagttataacttgctcctctcatcctaatgtttccagatcagcatcatggatgcccccactttgggaggatgtgctcaagaaaaacagggttccttctattctgaactccaaaataaaggataaggtcaatatctccctcaagagagttggtcatttctcatccccatccctacaagctcactcacatcctccaagtaaattacagaggctcaaatccaagagagtgtggccaagagtgtggcccttcttccccttacaaatagagcagaagctctatactaggcacagcaggctaatgaaaatagggctccaattgcccttttacagctcactcacagagtgaagcttccaaatggggaaaggcaagccagaagactagaaggtacttccccaacatggctctcttctcatcaagcagaggtaccctataagaaaagtggaccactgttcctgaatctgcagcttcagatcagtaattgagagaatttcctcactggtagaactagtccacaagggcagagagctctgaagctgtccccaaataaacaaactttatttgaaaaagaacctggaatagctcaagcctaagggtgcttccccgctttcccccacttaagattggatggcaagcaaatgagaaaaggcatgtagctaaaccacagactagctagtttaccagagagaaaaatgaaaagagaccactaagaagagcttctccagggacagaacaaacctcaaagactagtctcaaaaactacctcagcaaaagagctccaatttaattggttcagattgtgtagtaatttatgccctagggcatagttggtaacactggcagaatcgagcatcaaatagaagaaactaaaaggtcgatgtgatgccaacagggacatagaacttagcaaagagatcagggagcgtctgagagagacctgctaaaaccgctgtcaactgaggttgacttagcgcattctgaaggctgtgctctctgatcagcaacttcagagacttagtagcttttgttttaagaaccaagttttcgatgtctgttgtacagtgtaagataaatgatagagtgtttgtgagatgaaatgaattgacatttataaagcatttagcacaatgctagtgtggagtatttggtctataatgtcaattgctccccagaataactgaaaataagacagtttataaactcaatattagacattaaaacttttatctatgcatatattcctagcattataatggttcccagagaaggcaagaagaaaagagcttagttcctatcctttaggagcttacattcaaaccagggtgacagtaagtggaatctaagacaaaatttagttactgtggcagaagtaagtatagaatgcaatggaaatacatcggagagtagaatgaatatggcctggaaatgggtgaattgtagggaggacttaatggagaaggctttgatttgtaccttgagttgtgcagagattgctgtcagacacaggttgaacatattgatttctttcatttttaatccttcaggaatagtatctaggtgattattgagatagactagagcaggcataaatcaataagaagaagggtttcataagaaaactggagggtgcaccctcatacctatagtacattttggctggtaaaattatttgtttccaatccactygcagtagaccacggtattycaagcagacctcagtcgcagaaaaatccaccctccacatcattcttcccaggaattggccttagtaggacaaatgctcttcaaacctgcacagcattaattccatcgctgttattctattgctgtttcaccccacctcatcttatgatgatcagaagagaaaaagctgaggaaaaaaagagactgtcaaatacagcccttatatttgctaatagatatgaaaaaaaatgccccttgagctgtgattggttttgctcaggcctgttattctcaacctctgtgtagtgctgtatacatgtctatcattattcctctagaagaaaagatagggtactgataatggattatgaagcattcctcacactccatgatgagtataatataataaagataactgccaagaactatactaggtccatcaaatattcactccctaatttacactttaggtattatatctgaatgagtaagagtgaatagatatttgtcttattttggttttcccatagcagaccctgagacagggattccaggcaaggagttaatgtgagaagtgatcccagtgaagtgggtaagtaaaacagagaaaggaagagtctttctctgtagagggatgcttatcaagaaagttaccatatacctgcttagtatagcttattatatatgcaaattgaatcacatgtaattatcacatgtaatcagctgtatttctatctctctatatataactatasttatagttatatatatttatatggttaactatattatatatacttatataaattgtatcacagatgatcacgtatcatacgtgtatgatgtgtggaacaggttcaagtgcctgtttggttttaagatatgcattattattcttatttaatattttagaaaacttgcaaggagaggtgaagttgcttctacaaggtcaaacttatcattaggaacagaataataataatctgagccagaaaaactgtatggttctcagttcttaaatttctagttataaaagtttaacctatacctcacacccattaagatggctactacaaatagaaatgaacaaaygttaaagaggatgtggagaaagggaaaccttgtacactattggtgagaatgaaaaattatgcaggcactttaaaaaaatagtatgacaattctttaaaagaattaaaaatagaattgccgtaagatccagcaatccccattctgggtgcatatttcaaataatgaaaaacaggatctcaaattactatttgcatacctatattcatagcagcattattcacaatagccaagaagtggaagcgacacaaatgttcatctacagatgaatagattaacaaaatgtwtatacaaacagtggaatattatttggccttaacaagaaagaaaatcttgccatatgctataacatggatgaaacttgaggacacgaggctaagcgaagtcagtaacaaaaagacaaatattgtatgcttccacatatgaggtatcaaaagtagtcaaatccataaaaacggaaagtagagtggttgttgcagggactgggaggaagtggaaatggggaatggttgtttagtgggtatagagttccagttttacaagatggaaatgttctggtgaattggtgtacgacaatgtgaatgtacttaacactactcaactgtacacataaaatgactaagatgttaaaaacaaacaacatttaaattgtatattacatatatatataaagattattctatgtgaattaaaccttaataaagctgttaaataaaagttcaaatcagttttccagttagttccttagaactggaggaagccttgctttgcatgtagttcaatcacccactcaacgcaggaatctcctcttcttaattcactcccttctagataagctcattcaccctggatgaccccaattatctgaaaaaaaaaatttccccttataattgagcttaaattcacaaataggtattacctaccattagtctgaagatccaaaaacaatatcaaatatcaaaatcccgttctgccctatctggtcttgtaactctgcctcagaacatgtctttttttcctgtggcatatctcttatgataacgagaatgtatgtaggactcaaaatcaaaggcatccaaatgtctaaccaggaattgtttgaaatttgaccagagtatttagggttgttcagaaaagagatgagccctccattcttcacaccttcccccatgtttgacatttacactctgttaataaatccagagaggacagtaggaaagaatactcaggatattcaggatgtttcttatattgagaaatttgtaatgcaaaggaccattggagcgtgcaaggktgcaacgctgctgacatgtcagaccacggagtttgctgggttgtttcctattctttcttttcacagatctgtctccaccatgaaacattattatcattaccagcatgccatgactttgaacctaaggccttaaatttgctctccatgtgctatgcattaataaaattgatatactgtctatgtactgagtacagtgagggttaattaaaatacgtaaagtacttcgaggccttttccttaaagatgtgagctgagtgcattattattactataaatacaaattgaaaaatacaatcacattctccctgtagacatctgtactggagatttttgcttccaattctacagtgctcatgataaggtgataacataagcaatctagcagcaaaatttatttttatctgcattctggaacaaagatttaacctcttgaggaacaacccaaagttaaaacgtatataaattttttccacatgtcactccgtggagtttaattcagatagcagattttttttcatcccttcaatttcacaaaggcagggataaatcaagatagatacaaggtctcttttgtaccaaatatattttattatctaatcttaaaccctggaagatgatttgtaccaatgcccaacaagttagtccaactccaaaagactctgtgcatgctgagacgaattggaaatgcaatgtcataggagaaaataataataaaaaaattgaaatccagaaactaatcaaaattaaatacctttaaaggtaataagacccagtttttatgatttggttaaaaattaggtaacattatcagagtgatttggagcaaattgcttagtctctgtaagtctcattttccacatcctaccttattcatgtgaaaatggatcaaggaaatgcttgccatggagcccaagggcagatgatcaataattggtagctattactggggaagcagtttatgatggtggttattatgttaggtcctgaagtcagactgcccatatttgaatataggctgtgacatttacaaattgtgtgatcctagggtggttacttaatactctttgcctcctttttctattctctaaactgaaataataatattgcctatttcatatgatgaggaaattttatgaggtagcatgttgacagagctggagcaatgcctgagtcacaataagcattcacataatgtcagatgtcactattattatcattgccatcatcacatcacaaatgcaagtttttaggatataaaagctatgatattccatacaatggaatactattcatcaataaaaattaacgaactagtatacaacagtgtggaragcaaaactataggaacaaaaaatagatcagtagttgtcaggggctggggatggagagagagattgactataaaggggtagcacaaattttaggggtgacagaattgctctgtgttttgattgtggtggtggttacaagactgaaagcctttgtcaaaattcacagtaatctaccccaaacagagtgaattttatcttatgtaagtaaatttagaaaggcaactaaaaaaaagtgaaatatgcaatttctattgcccaagaacttcattcaactcaaaaagagtctttactagacaagtctttagatttaaatttctaaaaattagcatataataacatgtaaggttggtgctggagaagaaaactctctactaaatatagcttcagcactttcctaaatcatttgtaattgagttgttgactatttagcctttaaataccagaccatagctccttaatggagccctttgttctccccagcrtcttacagtgggactgaagtattcaatttttagaggcggtggatctatttattacttgggttgtggtgatggtaacaggagtaaaatttacatatgtctaaactcaccaaatgggatacattaattatgtgcagtgttttgtatgctaattatatcttaataaagcttggggagggggaaatcttttaggttagaaggcctctcagattatggcatttcatgtacttactgaattagccatttttaatataggagttcctaaattactaacatttccaaaagtgatatttgatggcaaaagtaatatccttgtgaagtattaagtgatttttatgaaaaagtcaaatgagctgacagagcataataattacattgtcaaagaatacaagattccgctttctcaaagccatctatattgcctggttttggatgcacaggctgtcatcaagatggtaagatttatttctcctctaattgcaccatggcagccggtattacacgcaagatatctagggtgcccattgttcagaagtgtgcaaaatccatggcattgcttatgtacgtggttatgtacacaattaagagaatggcttgcatgctgatggaactgaaaaatagagcttgtatgaagtcctggggtggtgctgttcaaatgttttaaaatatttttaaaaactgtgatttattcatcagcaggaagattaaaagcattttccttccacaatagtatgttccagactctaagctcagaggaactgctcaccagagatgtttgtccttttttgtggaatttctgtggtttactttcttatgcattaagtatggagtatgcattattaacccattatgggtatatcaaagtctgtttgtggcctattcatataaccttggaaatttcacacataaatcattagagaaacgcaatgatctaatgcttaggaccagggagcacagtcaatagttggcattgttctttcgagctgctatgtgtgtcattggaggacaacctggctgatctgcatttactctaacacctcaaatgctcatttcttttcaatatcatgtatttaatggaatttacgggacacctatggggactaccttgcttttggctaaaaacttgacgccaacacacagcaacatatatgtctcactcagttctgatgatgctttagaatagtgctggtgaactaatatttgtgcttatggaaaattagaggacaaaacaaaaccctaaactgtgaagtgacatgctgaattgaaattaattagatgcgtcagtgggtggcaccgtagagcttagttattcagagtgcagttttcagcatcggctttcctaagtctgaatctgagctttgctgataactagttgcatgtctgtgagtcagttagttaagctactgtttcttcatctgtaaaattaggattatattacctgcttcatcagctactgtataaattaaatgcaattatctgagtaaagtgtctggcattgctctaattaaggctgtgaatggcaccctaactgaagaatcctatcacttacgaaggcttcatcactttaacactcatttgcaccttgcagtgttgaatactttttctttcctcaatcatacttcggtaggctctcccaaatttttcacctatctcccattcatcgtcctcatcttgacttctaaatgtgtttctttctcatgctcttcttcttttccatcttaaatgctgttgctctccggagctcactctggattctcttctcttctacctactctccttgagggggtctcatttacagtgacacttcgtgtaatattaactcatatactactcagtcagaggtctatatctatagcccacagctctctccctagagaccagtgtcctcaactatctactgggcaccttcacctagggtcttgaagttatctccaccacaatgagtttgactaacccatcccaaaaacacaacagattgcactgtcttctatcttactttctttactgtctgccattttcacccagccagtgatggaagccattaacttgagaatcatactcaatttctctgctcatcgccctccacatctagtyagttatagagcagagctgatacaacctccagatagatctcaatcccgccctctccttctgaaaatcctctcccagctgcctccacatcacatcctcctaatatcagtgacccctgcagccacttctcagtctccactcaagtaattttgtggaatctctcattatttttatgttgcaagaaacttctaatggagtctctgtttcctaatattgcccttctctctcggtttccttctgcaggagaaccactgattcaaagatctttctgaagttcctacttaaaatacttcaaagacttccagtagtctttaggatgaagaggaaaaaaattcccttatattgtgggccctgcaatcccataaacttcctgactgaacagctaatgttttccttctatttgtagttacagtgcataatatagactgtaatttggtttggctctgtgtccccacacaaatctcatctcaagttgcaatcccccggtgtcaagggaagggtctggtgggagataaatggatcataaggacggttcccccatgctgttctcatgatagtgagtgggttctcacaagagctgatggttttaaaagtgtttggcagtctccgctttgctctctctctctcctgccaccttgtraagaaggtacttgcttctcctttgccctctgccatgattgtaagttccctgaggcttccccagccatatggaactgggagtcaattaaacctctttcctttataaattactaagtctcaggtagcatctttatagcagtgtgaaaatggactaacacagactgggtccaaaataaacattttgatgattcctagagaatgaatgtcaacctcttcaattaattccctgcctctcaaaattccacaataagagtcctttactccagttgtagaaaactgcttgcaagtctcttacactccttgctactttttcattccatgtctttgcatgttctatatcctcatttattcaactttgtactatatcttggggacttaaggagtgaaaaagataaacacggtttttgtccttggaaacataatagtttagtaggaaaaaaattaaacaggtatttaaaatataagtggaaatagtattgtaagtttcctgtagatctggttaaaaaaggagaaaaatgatcataaagaaataagtaactctcatgtttattccaagaactatgataaacccaacaaaaatgataaagatttttagcaactgacttagatgtctgtgaaatattattgggtaaaaaaactagcttactaaacacatgcttttctatcctttatccaccttatttaccactacttttttttttttttttttttagatggagtctcactctgtcactaagctagagtgcagtggcgtgatctcagctcactgcaaccttggcctcctgggttcaagtgattctcctgcctcagcctcccgattagctgggactacaggcacacaccaccacgcctgactagtttttgtatttttagtagggatggggtttcaccatgttggccaggatggtctcggtctcttgacctcgtgatctgcctgtcttagcctcccaaagtgctgggattacaggtgtgagccaatgcacccagcccttatttttttttttttaatttttagctcaagtactaccatctcttgaaaatactgccygactacctcagtcatcctctgcattttcttgccacagtagcatgggaaatttgtcagaccttttaaaataaactttttatttttgaataattttaaatttacagaagtgttataaaaatagtgcagagatatcctatggactccttcatcaattatcatcttaattaccatggtatgtttgtcaaaataatgttccacactgagtgataaacactgttgtaaaacaacaaacaaaaaaacatagctctatgaattatttgtgtagcacagacctccccacctcacccccagtgcatggcctgccacgggttggttccctctagagactgttaaatggtcttccaccatttggataggttaatatggaactctttctttttcctttagcctcaattacatgtttctatgacaggattttgtgagcaagtacagctgctagtttctaggtttttgcctttttctaccacaacctgtatatacaggaaaaggacaaggtcttctcagtaggtggaccatatcttaagagagaatcacgagagcatctcaatcattcttgccccagtcaagggcctgggcatttttatcttttgtccagctgtctaagtacagtattgattaccagcccttttcagacatctcttaaaagtaacaaaaacaagtaaatgaaagtcatttgaggatatttgaagggtcagtggatacccaagaccttgtgattttaagcaatgctttcaagcagttcctacagtatctatatttaactagtcctttattttgtctgtacataaatgtttgaagaaagttgttaattcttattttgacgttaatatgcattgctattcttagcatagactcaattcggctcccgagtcaatatcttcctatggcccctatatatcatctatgtaaactttaccaatattgaccaaacacctgctgtgtgagcagtcctgaactaggcactggggagaataatcttaagcagaaaataccctgcccttgaacacagaggtaggtgctcaaaatcactagacttttgttagatttgttgtcttaatatgttcaaatgacactagtaaattggctttacctattcatagtatgttgttgcaagaattaaatgatctaacaaataatattcatagtcacatgaatactgaaaacagataacatttatatagcacttaatatgtgccaggcattctttcaagtgtgttctattaattggtttactaagaaaaaaatctgtgaactacaaaatattctaaaaatcaatgtgtgactgctattcttgagtatgaggctacatcaagcagaagttaactcttcaacgtggaatgagcttctgaaataaattttgtggtgtagcatttacatgctggcagagggtcaaagaaaatgaaggccaaagaggcctggagagactacccagggttcagagctatatttgggataaagagcttggagggcctgggtctgcatcccaaccaaagtcattcatggcatcatcattatcccctagtcattgtcattattaacatcatcattgctaccagttcttattatttcatgatcacttacttcatgcgaggcactttgcatgygctatttatttaatcttcacacaaggaaatcctgggaagtaggtatcatcatcctcaatttatagacaaggmaagttaggctcagtaagaatatattacttataaatattataaaactagtaagttttataactggtaaaacaagaatttgaatctatacatggctgaattgagtcaaagttctttcttgtacctttcatgtcctttctgtagaagggaatcatgataattcccaccacccaattgtagctccgaaagcaaggtcatcattcattctacctttcctcaaggaagctaaaggatgccaggaataacaaggcctaatggacaggaggtggtctgtttttctaaaaaagaatgagatttgtcttaatgaagggtaattaacttcaggagagattacatagcttctgcttttacatcatcattatcwcaagcttgtaagttttaaatatttccatttcctttctgtcattggctgttctcaaacagtaaagaatgcagaatcaaatcttgtctatttcatattttgtctgattcacataatctctttgagtgcagggataatgtcttcttttagatcctttttagtctcacaatatttgttactggtctggatgtatatcaggtatgacagttaatctattaattctgtgaacattgggggtagaatgtgtttctgaaagaaatagggtatttcaagttagagaacatcaggttaatcttgtctttgccatttattatatgtccttttataagaaggtactttagtaatcttattcttctcatttgaaaaactgggattatgttccacagagaatgggtgtaaaattaaaataatatacgtgatgcaaaraagcaggtccaytgctcacttgttcagagtagacattaatattcactctttttatgtttcctccagtaggattagtcaaacttcagaaatcttctcaacacagagtttcatacagtatctacccactaaaatgaagttggtgtgtagcttatgatttttatattgttccttgcctaataggagaaaacagcaagcaaatagataatttcaacactatgaatacagggaaggaaagayagaagagaatccttaatatayaaaagaagaaagagaaggaagttggaagggcttttcaaggagtcagcatcagtgaaatgaagatgatcctatagcaacacagaagtagaggatacatgggagaatacagaaaaaacatatgtagccagtcacaggctagatgacaaaaatcttataagacaagccaattcatgattggaaatcaggggagtggactatgattgtacttcagtaaaattattctgaccacaatgaagacaatggattggtttagggcagggcttgagctagcaagatgtttttatgggttattaaaggaatgtaagtgagagaaattatgtcttcaactaagataacagcagtagtagtgttgtagaaaaactgggttcttgtcacatgaccatgaaagattaggctcagagacacttcgaagggtgagggggagtggaatttattgggcaaaaaggaaaaaaactcagcagagcaagaggggttcctgttaacaggcccccatctcacagattgaatcccaggttaccacccaggaacaggagaggccaggctcctctcctctgcaaactgggcgaacttcccaaggccccgccctgtcctcccagtacacaggtgggcattattcagaaagaatccctcaaggaaaaagggggccttcatccaggaaggcagtctggtttttcagccttcaggctattttaggtttgaaggtggggttttctgcctcctgtctctattagtaggaatagaggaagttattagaggaagttagagagacttgaaaaatgctaaaaggcaagaacagagtacatcttttgactgactcttatgagagagaagagaagaagtaaagttgttgcagaagttgaatggctttaactgcaagagagataacagaaatcaatggacaaacagaactggttgaaaaaagacaataaggtctgttgtgatgactttgaggtgatgaaacgtgtatttgagggaaaatccccagcagtcaaatagaaaaacttgccttgaataaaggaaataagttaaaataaaatctatatctttaggatccatcaacacatagaatataattaaaaataaatttgtggataaaattgtccagggtgacagtacggagaaagaaggagagaatctgaacaccaaactttgaaaatagagacatttaaagaaaacacttactagaagaattctgataaggaaaagaaaatacgaaattatggaagcccactctacaaaaagtttatctagggaggagaaagaaatacattatttttttcaaagaaaccaatgaaggctatcaaaatggttacctagggatgtgggtagtgaaaattcagtaaaattcacatggaaatggggtaagatggtgtcttggtttatctgtgttgctatgtagaaatacctgaggctgggtaatttataaagaaaagagatttatttggctcacagttccgcaggctatataagaagcatagtgttagcgtctgcttctggtgaggatctcaggaagcttccactcatataggaaggtgaacaggatcaggcatcacattgtaagaaaagaggaaagagagatgggaggaaggagccaggctctttttcacaattaaatttcctgggagctaataaagcaagaactcactaattactgtgagaataacatcaaggcatttatgaaggatgcatccctaatgatccaaacacctcccaccaggccccatctccaacactgggaatcaaatttcaaatcaaactcattcaaatcaaatttcaacataagatttaaaggggacagacatccaaactataatacataggcaagaatctaggcaactgaaacagctttaggaaaactgaaagggaagaagaaaaaaaagtcttcatagtttctcaaccaactaggggcaatagagcattcattattaaatgatttattggggagttaattgtaaactaaaattggaataatttcagtgtaaatatagtcttcacaatccaccaccgtatgtaagaagatcccttaatctaaatttggctcaattcactaccattaacaagttccaaaatcatagcccctgaaaaaatggtagtccgccataagtttttcaccagagatcttctagtgaccagcagtagctctgtaactgtgatagcattcatgggtctggaacttactgttattattctgaggttcatatttggaaggaaatgccaattatgttcaagtgatttaaaaacagtaatttagagttatgtttccaatccagcctctattcctcaaaacctttcaacagcaactttttcctaaattgtttcaggaatagagaatacatacagagctttctcaaatcatgatgatctgatcaatgacttctgttaataactgggtttttctttttggtgtcagggcatttgtgcaccttctgcggtaatgtgattatctgagagtacaagaggatgcatgaaaagttggctggtagaaacaagatttggaagttgtaaagcaactctggcaactgcttagcactgatggctattgtttagtctgcacaatgtcatccagcacaatattcaatattcttttaaaaatagtcatgagcatttcaattcaaagcacaaacatggatttttgttttcttgtgaaaaatctgggaacctggccccagtgatctcacattgccttcgtcatcaccatcagcaggaactgagtcaagcttggcctttagcatgtactctctagtttgtcactttctccacttctccctatttccccttggtcctaagttccggtgaaagttgtcttttgttgctgttgtggcaattatgcttaaattttcccctaatgtttagagaaaagtcaaatattatttggatacacatacttagcagaagtaggtaaattaaggtagtgcaagatagagttatgcttcaacaagaaaagaaagaaagcgagaaagagaaagaaaaacagcacataagtctgtggaaatggatttcttgtttactatgcaaaccaagtgcaggtatgcatgaaaaaacacgctatatgagaaaaaacaagcaatgtaaagcaaacagaaatcatgtgtagatgtgcaagaaatatcaaacctgcttaacaaatttttatctctgtattagtcaggagccagtgaggagatgtaacttatgtcaattagtttaacagagaggatttaatatgaaaaataaaaactgcatattgaagaatcacggacagcaaatgtaggaagcagctgtgaccccccggggctggaagaaaatcaaggaaaacgttgtacttgttcaaccttgaaggtatgtgaaagggcctctgtaaagttcaaatcaacctctgagaaggggcctggtgagactgcaacccagacttttgcagaaagtagtgccagctggtatgggtgtctttgaggagaaatgatgagacttattctgccaaagttggacaaactgaaaattataatcccagcactgctagtcctggaatgcactgctgtcactaggatggagaaatgttgctaagtggacactaatgggaacagaaggaaaactaaaactgaaacaaaacagaaacaggaagaaaaccgaaaagacttaagttctttcatcctcttcaagccttccagccgccttctagtgcctccgtgagctgagcctctagtaattggctaagtcaaaatgtggttttcagagatcaggccctagcatcacaaaatagtataaagaaagaggttttgaaaatgaaagtcaatagcctaatggctgctacagctatctaactggtcctttatctgctagagtttgtaatctcggccttaaagataaaattaaaatatttaacaggcccctatatttgtataatacattatgatctataatgtccttttacacattgatttgtgtcaacttcatgcatttaagctccacaattatgaaaggcaggaatggcagatatggtcacctcagttttccatatgaggagaaggaggtagatagaaggccattgatatgccagtcacatgaatgcaaaagtcagaattgcaaccaagatactctgtctaccagcccattgtctaatcactgcagcacactacttctataaatccacaggtaactggactcctaaaactaatgaagttcacaaatcccactgccttagggaggagaacactggtgtttggcatggctcattgtcccaggtcagagatgaaacccatttgtttgctgactggttttattaagttctgaagaaaaaaatatacctgtctccagtggaaggtattgggctatctgagggcaattgaatttaatgtttcctggaacaccaattttatgtcttgtaaaaaccctgaaggaatgcaactcagcttattaccctaaaagaaccatgtcttggtttgcaggctatcttccagtgccagtaaggagcatagcttctgagatgcacrgtgatattttcctatcatcatgggaaaatctkggtgaattagggggaaaacaaaacaacaaaaaggcttcccttccttaaaaaacagtattgccacctgccaggaaattggaaaaataggtacacaaatctgtcaatgaaaacaagatgaaagttaccttctggactggtgcagtgtacatcttgaacagctgtaagtggtggcctgtgttttctcagttactagttccacagactattaaaaagttttatataaggcagtggattatagatagttatgcttaatttgtatttgctttgtttccattattgtacgtgtcatatcctttgatgggttttatggatgtccagacaggagcataattacattcctcagttttctttgcccaaggggaaaaataaataaaacattttcttcagggaccaactacagggaaaatatactgtgaaatggatctggaacaacactcatccaaagacacaccctgaatttcctcccttgttcactgccctttacctcagctttgctaaggaagagaagcctggtattttttttttttttttacaaataatgatgtataagtatctgttggggtcaggtygagacagttacttcttatgcttcatgattccccaaggagattttatttatttgatccctgatccatacaaatgtgcatggaaacacacacagaatccaaattttggatttctgggtgaatacttttatttcatgttgccaattctctcgttctctgccccctctaaaaaaggaatcactaacctgataagagatattggggacaatctgacatcaactggattatctcaaacaggaaggcgttggcacttcactgaaatacagggagtggggcccatctatttggctctatttctttcttcctctctccttcactcactcatgactataaaatacattttctaccctagaaatggcatgggctttctagtaaagttgttagctcctttatgactggaggaattacaaaaataaccaggctactgcttgccaagtatactggagagaagtgttaaactttgaatattgaactagataacattggaaattgtgtacatcccaagattctatttttatagataaattccactaaattttaactctaaaattccaaacaaatgtattcacgaaggccaggagggcgtagtgcttaggcttgtgagcttggagtcatgtttttgtattgcattcccagttctgccatgtaatttcttggttatgttggagtctcagtatcttttcataggaaataggaacaataaattaataattaaataaattatattgataaatagaaacattttgatcactgaacgtaacaaaggtatatagtacagtgcttgccaccttacaattgctcaatgaatgagagctgtgattatcattattagtgaatgcaattgaaagcagaaggaataataaacaatttctccagcagaaaactaacaatcaacagaaggaataataaacaatttctccagcagaaaactaacaatcaaacaaaacagtggaagagagtttgaggagaacaaagggatacagatctttcgttggcttggaaccatacggatttggggacagattgtcatcacaactcagtccgtttgtaatattgacctgaattttaatatgcacccctaactcagattcctctttctgcagatttacaacaactctattctagagccattttctaagcaccaagtaggagttacaaaaccagggactaagtaaatataaatcatttagtcattcattacttcaataaatatttaataatatctgtcacagtcagtggatgaggtactagagaccaactggtgaacaacactggcttaatccttaccgtgatgtaatgtgactcactcttggagtggtggtaaatgaggggaacttatacaggcaaatctctctctctctgtgcctctttctctttagcaaaaatggaaaaattcctttgtcatatgactttgcagcttctctcagcaagaagtggaatctcctattcttttaaccaaggcttacccgtgttactgttacttgatttggtcaatgggatgtataaaaaatgcttctcagtctcagaaagaagcatgcaatgtgcgtgtcaatggactttgccatctcttgatattattgggagccctgcaatatatgtttacataagtcagaatagtattaattctttgggcaggagtgtgtgtattgatttggaagtggcatgaaggagcactctggaactattccatatcattatctgggtggtagttaaacaggtatgtgcatatgtaaaaactaattgagctgaaaaattaaggacttacacttatgcatattgtccctgtttatatacacacatgtgcacacatgcacatgcacacacacacataaccaaggggcaatggctcatgagttataaaaaaattgcatgagtatagtatcacaggagctagggataatcatgttcagctatgatgaatgtggtcaaaagattgagtaagatgaaaatagtaagtttgtactggatcaagcaatgtgggggttgttgatatacttggtgagaacagttttcatggaaatagttggggagagatcccattttggagtaggtttaacagtgaataggcggtgagaaatttgagatggtatcacatctaaataactctcttaaatactttgttaaaagtaacaaacaaatggattggtgataaaagttaatttgggagagagtgttttaagtttagggatactaacatatgcttgtatatagataagaaggatctagaagacaagacaaagttgagatagcagaagaggggaaggataaatgaaggagaaacatttattttattttattttttatagccatttatagtcttaccaaggagaagcatcgaaaaaatttagaattttaaaataaaattactactctactatattttcattggcaacctgctccattagtaggaacgtaatatatgtgaggtgttatcatttctattagtcctaatctacgctttactggatgagcgacctagactcagctaatccctccttaatccctaactgtaaaggaagagtcttaacataagaatctgttaattctgtgacagttacaaattctagggtttttttttttttatttcatcttgatcacttctgttctataacatgcagccacagttttcttacaaagatcacaaaagattacagacagaaaatatcccattggccaaatcaagtaacacacaagcctggattaaaatcttaagagactctacttcttattgagaggagctgcaaagtcacattacaaagaaatgttcccacttttgctaaatagagagcgagacagagagagggagagagatttgtctgtgtatcttctccccactaacctccactccaacagtgagtcacattacattatgatggcaggaaccaagccagtgttgttcatcagttggtttctagtgcctcatccactgactgtgacagatattaatgaatacttttgttgaaggaatgaataactgattgatatgtaagacttcatacataacacttgatatgtattaatacatggatatgtaagatttgatatgataacactttgtgcgtaaaaaataacagagaaactgattggtaataaaagttaatccaggagagagtattttaagattagggatactaacatagacttgtatattggtaagaaagattcaggagacaagacaaatttgagatagcagaagagaggaaggacgaatgaagaagagacatttaccaattgagaattttctgaaaaagttaccattatattgttattggctacttgccccattagtaggaatttaatacatgtgaggtgttaatatttttattagtcctgatctacctttttagtggctgggggacctggactcagtgaactgctttgtaacttctaactgcaaaggaagagctttgacatcaagatctcttaattctatgacagagttacaaactcaaatttcttatttcatcttgatcacttctgttctgtaacatgcagccacagttttcttataaaggctataaaagaatagagacagaaaataggctgaaaagctccccccggaaatctaagatttatcagtagagttgtcttcgggtagacttgtctttaaaattccccaaaaggcccttgtgactgttcaagttttaatctctctctttcatttccacaaaacaagtacatttcctccttccactgtgaaattgtcttgtcacttgtgacattaatgtagaggagaaatcctttaaaggcagcctttgcttctcttgatcttgcagcatgcctcagccaaggcatcctcaagtgcatacacagctagaggggagagtatgggctttgctttctgcatttcaaggagagtgggaggagaaagtggggaagaccgctggccaagatccctatatcttttcatttcatactactttctctgacctagaccaaagattattaaggttgaaagggacattgrggaatcatctaatctacctcccacccccaatccttttacagatgaagaaatcgagtagtaaggtgatttgcctaggacttcagttagatattaacagagagtgtctccaagtccctctcctgtgccttgctattcattcatcraaaagtttgcttcaggtgggctgggctatgatgaactccatgtggttttagtgaatgattcctaaacctgagtgatcatcagacttagctgtaaatattttaaatactttaaaaacctacaggctgccagatcccattccacacggtgtgatatctaaatctgtgctagtgtttttgtctcagaatctgtaattgagcagagaagagttaacataacaagtctgatctttagaaggatcttcttctatgctggttctttgctggtatcttagtacttagatgctataaagttctctaagtgataagaatatatgcctgcttggggcattgatcacctgatattcttctgggagtctggagttttgatatttattactgatcattgtgtctatgtaacccatccccaataaaaatcctggactctgagtttcaagtaaacttcctggggcataagaagtacatgcgggttactgcatttcaggactggagggagggtgtgctctgtgtagcccctttggagagagactagaaagggtgctggtggatttggaaactagaaactgcttgatgtgtatttttgccttgtggatctggctatatcttcttactgtgtcactgcaataaatcatagtcatgaataaaattatatgctgagtcccttgggtcctcctagggaagcactgaacttatgggtggtcactgggccgctgaaacaaattacgtcagataccgtggcacaaacagtgacaacagtgttgacgcagaaaaatacaaatatcttctgatatgtcttatgagcagccagttttggaaacctctggacaaaaccgtgttacataaaaatatgtaataatgggactgttgtattctgaggaatcaaggaaatgttctttatttatatctgatagacttcttaatagtttcaaaagcaaaattttgatatttcatcccaagtcatctcgctgatatcctttctctttcagtaaatggcaatttctgtttcctattcttaattttctcaggccaaaaacattaaagtcactcttgctaggtacaatggcgtgggcctatagtctcagctactcaggaggctgaggccagacggtcccaggagtttgaggccagccttggttacatagcgagatcctgtctctaaaaaaacaaaaacaaaaacaaagaggcaaacaaaaaaatcactcctaattctccccttcttttcatatcatatgtaaatcatgattattgtagagactcaattctgataacttcataataactccacctttacaactccggattaaattgtcgtctctcacctggaatgttgcactagtgcccactcatctcctgccacttacctcgtggtcagactgcttgcctcatgctagcccaataagccataggtcaccttatgtcacatctatcctcaaaagatgccaatggcttccatctctgtcaaagtaaagtctaaaatccttatcatggcctacaggcttctttatagtttagtcccaaggactgctgtgtctaatctcttccctctccatcacaggccttcgcctccagctacactgtcctccttgcggttcttaagctgaccaaacatgctcttgccccagtttctttgtaattgttgttccctcgacccacacttttctcccaaatgtcagcctggcccgtgtcctcactctcctcggatctcagctttaatgtcaccctatcaaggaaagctttcctcagaagcctaagtaaaacccttctttacctccccttatctgttttctgaccttacttcatttttcttcaaggcattctggaagccctgaaatagttatgtgtgtttgtccatttgagtattgacgtctttctcttggaatttgttgtaagctccatgagccgacacttggttctgttccctgacttatccagtgtctaggacagtaactgactctgggaggtaagaaatatgctgaatgaatagataaagcagtgattgtgcaggatgaataggaatttaggaaaagggggtagtgaagggagagcatgctgagatggacttcagtgagaagtatgacgaagagaagatgtgaggttggttacttcagagacacggaccgtgcaggtgaggcactgacacattctgcagtggctgcagagaagtctgaccctctttggtccttcttttgctttcactttgacattcgttgcagtcagaatgatttcctgagttctccatgtcaagactgtgcatggacacagtggattgacacaaatgatatgaaaacagttctttccagcctgttttgcttgaggcccttggtaagcttgagaagccctccctgccagggctgcttctatcgatggagctagatcacggggctgctcctctggggccctgcagggctgcattaattaataggaggaacggcctttgacctgccagagcaaaacatgccaagaaagtgtatgcctctttctttctttcttttttctttttttaatttgatttttaaaagaagactatgaatttcaamtaagccaagactacagaggaatttgcgagggattaaaaaaaatctccagcccaggacccaaaaactcttcagagtttgaacatttgtttggaggggggtaaaagtgctatgcattttaaaagcagaattacaataaatagagactctctttctcctttctctctcacatacactctctccgtccctccctccccagatgctttagggaataataggacaagtaacgtttctattactgataaaaatatatgttttatgcatactctggagaaatttgccagctggtctattatggctagaagggagctgccatggaaaatgatattccactcaggttatttggatatttgcatgttttgcaagaaagacagatgcataattatggaaaggggatttggagctaaagtagtaggagcaggtataaaagtagatgcatttgagatcactttttctttcactgtagatacgacagactttaaactgggttagacatttattcagatacagttatgctccagaaatctgaagtgagaatagctttcctccatggcgtcttgccagccaacactatgaccaacaacaaaactcaattactgagtaactattgcgcgtaaaagaatcatagggtcaccccagtaccaaagagcaacacagagcagtggctaaaaatgtgctctgaagtcagaccactgagatcaagcaaggctcaattctatcatcttaccagatcactatatttggacgactgagttaacctctctcttcttctcttctgtcataagttgaattattgaaattataaaattataaaacctgaaaagattatcagattttataattagacaatgaaggcccaaaaaatgaacactgtcattatttactgtctggggcactaattctataataaatcaatcacaatgccaaaaaatattattgtcgttttgaatttaaatgcattgttcagcaaatttttatcgaattctttttatcaagaatacattttagttaacccaaaatatacaaaatattacttcaaattgtattcaagttgcttttagaaaagcaacgcagcattgtgcattatttttctacaaagtctcctaaattccgtgtgtatttgacatttgcaacacatctcaattcagaagagccgcgttcagaggatttgaaggttggtggcagctgtgtgggacatatcaaattcttaaaatgtgctagacactagtctatatgatgtgaatgacaaaaaaaaatgatgcttccttcctttaaggagcaggcaacatgggtcagacattcagtgccctcctttttagctctattgaaaaatgagctagacagtcacactactgaggagtaaaacaactgaattcaacccccgccaggaactgcagctttgtacccattacaaatctctgcccctcccttctcctgctccaagtctctgataaccactattgtaacttcacattggattagttaattgtttattaattgtttattatctaattgaatgtgagtaaacttgagtttattatctaaacccaagttagacagtaagccataaatatatattactgacatcacaatcgcctccatttataatcaattactgaacaaattgtaccaaacatgtgtacttaaaatccaaaggagagagacactgatgtgatcgatggaaggactactgatgagtaaaatcccaagttagatcttataggatgaatgcatctttcctggattaaaagaaaggaaaggatattgcaaacctaggaataaactgagcaagttatggcatttggaaaggtaggcctatttaattggcagcgagtaggtcctcttggctggagcagattcatcttgtttagatcaatagaggagataataagattaaccttataggttaatggtagaatttggttgtagaaggaagtttgaggacaaagaagaattttccagtgaaggacaggtctatctaagattgcagggtcatcctcaacaccaacatcgtcacagggaagtcttgaattgcatggaccatgagtagataatgtctgacatttttctcatgtttagattctgtggcttacctctagaaggcctgccaaggggataatgggctttaatgatttcatcaccaaataaccatgagtatgttcctctctctgtttagtggtgcatatggtgagtatatcgtgtggatggacagaaaggctgctagattccccctccaatatcactttcacctgaatggctgtgaagatttaatgatttaatttctatagaagttctttgtaaattgtcacaggcagtgtcaaattgagattgaggagcatagaatacaattgacatttttgacttacaatcagttgtggcaacaaggcaatagacagagctagactttgacctccaggactcctcttttccataccagtgccatgcataacactgcctccatttttaagacaactcttcattttttctctctttagtggcaaatactgtgtaagtaactccccttctctcaacttcgctatgaagcagatattactgctaccacatttcccagatgaggaaagtgatactgagataagacaggtaaacagcccaaggtcacacatctttaatgagcaaaggcaggccttgaccctagcccacctctgcgagatgctaaaatctggctacaaagtcttgctaaaggatttctaagcctacgccacacaggctttggagttaaaggctgcctgcctgctgctccttacttgggattcagggtacccagggctccccactatggctctcttgaccccgatttatccctgtgccccctaaatgccctttgccttttcttcttagttaactgtgtgcacctttgaaaatttatataactatgtcttcttgtcactaacagaaaagctacagctataaaatggaactttctggaatgaatggttatataatgatgctctgtgaaggaaaaagatataactttcctaagggtagcttttggtttcgacccatttatgaagttccctcagacaagtatctcaaatgctttgtacctcagtttcttcatttattaaagaagaaaacattggctgccttctctgttcaggagggctgatgggaggatgaaatcagatagctcaaaatggagaaaacaactaaattataaagctccaaacaaatggaaagcattgttacttggcaggaagctttgcttgtagagagtcacgttaacaaggactgtggcaggagaatggcgtgaacccaggaggtagcgcttacagtgagccgagatagcgccactgcactctggcctgggcaaaagagagagactccgtctcaaaaaaacaaaacaaaacaaaacaacaacaacaacaacaaaaaacaaggactgaacccatattgtagtgatgacactgactgctggagtaagcttgtgcatgtcccttaaagtctctgagcttcagttttctaatctgaaaaacagagaaacagagtttctcgcaggatttctgtgaagattaattagggtttttcttagaacttaattgtttacaaatcattctaatatttaccacaattgattattgattggaaataacacattagaacatctgtaaaatgcaaataaatatacacaaaggttagagatcagtatggtttgctgaaacaacttcaggtaactgggggcttttgtaggctgccaagcaagcctgtatagatcatggcataatcagcctaaacggtcgtgctccacagtctgagtcagaacaagtctgaagtctaagacacagacttttcttccagttgtggggggcgttaaaaagacttggtgcatagaaggacggttactcttaataataatgtcttcatcagagcatgtgctaggcaagtccctgctgtccctactgtccagaggagggagggagaagtggggagctaccttcgtccactcagcccttccatccttgggagagcgcgtgcagcagtgtcttgctgtgcaggctaagctgggcagcccaagcacttggaatgaggtcaagaacttttctgactccttaggtacctgcttccgtaatttttgtctgcacttgagacttactcagtggctgtggcctggaaactttctggctagcaaagagatgggcttgtccctgaaatccaggtcccagaaataattctggtgagagctatctttttcaaagcaaaaagcagcataaaaaaggtaaacaggttatccttgggcttaatatgggcctcggaatcaagtatacaaaacccagctttactattcagtgtctttatatttctaggcacatgacatggtcttcttcaatcttggtttcatcatctctttaaaggggataataatcccagcctttctagttcatggtaattaaatattattaaaagagataatatataatgaggtgagcattgtaatgaacacatactaaatgttcaaatatgaaagctattactttaatgttttttcatcttttaggaatatagacaaaaacataacatatgtattatgcctttgcctactgtgtcaaagcgaaggcctttatttaatgctgaacttaggcaaggcagtttgctgaagctctggtgaatacaaataaatttacttagtaacccttgtctttaaatagcttccaaaccggtaaaatacagcaggaaaaaatgagtcgcaaaaggcagtataggggccaaatgaacagtcaagatgaaaagtgctacaggaactgagatgagagagagaaatgatatgggaaaacatttaacagagaatcttttcttgttttatttagtccatccatctgccagtcagcctgtcaattattaatattagtgaacgccaatattgttccaaaagccatactaaaggtaatgtttgagttgggccttaaaaggtaaataggaagggtatggagagggtagagaaagtgggattaatttccctatgtatttaattggrtgtcaatgtaaatttaaaaaatcatattcaatttttccttagctgtagatgtaactacttgctgataattcccrtatgtttgtcctcatcccgaactcctctctctgactctgggaaagtagttctctccagatatgctaataatatctcaaatttaacacattcttacatatattgtgagcattgtcttttcataaaaaaatgagcactatgttagctcctgtctcaactaaggtcattactatctattaggagaagatttctgccctggtcctgagtgtctttgctgggtatgcaagagtacccaaaggcctaactgttctttaaaccagagtcatttctactgctagtcatatagatgtttaagcaggccaagatgactgcaacatgatgcagtatgaccacctactccccaaagactggggactgtcctatttagtgcttgctataaaatatactgggcccttagccctgggttcttcagctgcaatgcaacccaccgagtgtgtagctgcaatctggacccatcacatcactctgtgggccttggggccaagggaattggtactactatgccaagactcctattcattgctgctgtgcaatgattaatatcctgtcttgtattgatccactgagtctcattgtctgcttctgctctgtattattactccttgctctatgaaattgttttttttttctgataccatccaaccaatattccaatttctgcacctcaaaaattacctctctctggaccttgcaaccgtgctgtcataagatcagaaaatcaaaaccccgccactccaaagatacattctctagcttttttctccacagatttcctaaatttattccttttatctgaggacttattcatctcagayaggtcatcttataatttagtgattgcctgtttagggttgaagtaagagagcctggatttgaatctaagcagcactacctgaaatygttatgatttgaatggcttcttaatatcttagtgacttgttctcctctgatataaaagtaggctagtagtagtaactaacttatggggttgcatgagtattatgtgagttaaaatgtgtaaagcacctgtgacagtgctcagaaaatcgtaggggccccgtaaatgttaaccgtcatcattattattttcatcataaactttagccttatggcattttaaacaccaaggcgtagtcttcagagccatatctctcaaatgcttgaaggtctttctactggtttaacaacaggcacaaaggcaaattctcaatctttggcttttaaagatctgaagtcattctactttccctttgataatctctatctaatgcaacataaattatgttgaacatgcctttcttcttcaaaaacaacacatccttttatttccttttcattgaacttcttcctagttttctcaggttttttttttcttccttcatttttctgtatttatatttcttattgtccttaaatgactatgcctattctatgtctgagcacagtgaataaaacattaaatttaattaaaaatttaagaaagagaaggaatgagaaagaaagcactagaaataccagtttcaaaattttgtgcattgagaaatcattatttccaaaagattttctaagggccactgtccttatgacaattcagtgttctatatatgttcacaggttatttttttatcttaggagaaataaaaatccttactggataatccttatttatgcgtgtttttaaacatactcatacttccctctattgtttgtttcatagagagcacaaatcagatttggatatcttatctgggatttaaacaaatacgtttatacatgagtctatcaaaatccttatttacatataagaaaaaatatatgctcagctttgcccaagaaagtcccagttgatgcctataattctggtttaattattaatagctctcatttcagtctcaaaagtatctccgttttgatggtgaatcatattggcatcctagttataagaaagttttatgactgaggttgtacaagaaatcaaaaagttgcaatcaactattatttacatggtataagatatgcagatgatccaccaaaagcatttattgagtgtcctctgtgtgctcagcttagtattacatattcctttgaatgacgacctgacagggagataccctgacctgtggactttctctttctgttttcaccttcatctggggccattttacccaacctggagatgtaggatcatagaatctcaggttaaagagttcaaaacaattcttgtggttctgattctcagatacctaacttggactttttttttttttttttgagatggagtctcgttctgtcacccagactggagtgcagtggcgtgatttcggctcactgcaagctctgcctccagggttcaccccattctcctgcctgagtagctgggactacaagtgcccaccaccatgcccagttaaattttttttgtatttttagtagagatgggatttcaccatgttagccaggatggtcttgatctcctgacctcgtgatctgcctgcctcggcctcccaaagtgctgggattacaggtgtgagctaccacacccagcctaacttggactttcttaaaggaaaaaggaaaagctcaatgctgcctcatttcaggaatagttggatttgtgtgttcaaaaaatgtcatcaggagctatctctacctctcagttttgctttcagctatgttggtttcattctcaaaatggctttctccttacagagaccctgtaagatccaggctgacactcttgtagctacacatcctttagtgagactactttggttgacaccagcaaccctcaaaattcattttgacgagatggtttttgggttatgaatctgcatgtaagtaggaggcttggagattgaataggtggatcatctaggcctgagtcatatatagactatatatagatacagaagaagctggaatgaaccaacccaaaccacatgaactgatattgggaattgttttctaggaatagagaggagcttttaccagaaaacacctacagaatggcaaaactggaaatcacagtccactcaggttcaccatggtcaaccaactgcagattaattgctcatcatttattttcttcataaaataaatgtttatttttaatctacaggctaagatgggtttattttttggttcttgtaattgaacatgtgtctgtgcatgtgcctgtgcacatcctttctttttttttaattttttgtgcatgactcctctttaaagaataactaagggtaccaggcttcctcttcctctatcttaagactcttcatctcaaagctttctccaaccaaccatggacaggggaaaactatgaagaattcgaatatgcatgagtgagtgttatgggacgggcccggatgcgcatatatgacttccacctacatttcattagtcagaacacagggccatagttgaacacaactgcaaagggaactaagaaatgtaatttatctctgagcatagaggagcttaaacctaattccctgaatctaataagtggttccattttgtttcctggggtaagggaaaaaaagtctatgtccgcatgcaagaaaatgagcttcttgccttgttctctgtgcctgaatcccagcttttatagggttccagtattttgagacataacattctgatacctttagaaagatcccttagccactacttatccagggatcagctcttagatctctggtttgcaaactcccagccaatccttgtcctgtcctggaggacattctccaggccagtaagactctattatgacatccctaaccttatcacaactccatccccaaactgaccacagtaactcttattgtgttgattgctctttaccaacttgtttttactgcaggagccattagcatttactttcccatgttcagcaatttttatggcattatttccagccgtgctttaggtaacagtctgtcaaccccttgataacaatcccaatttatcgctaagttgtaaacattgtctccaagcaaagattggcctataggrtctaagccctgaagcaattttatttttacaaattctaaataaaacttatgttactcagaaggtaattctgggtgggtcatgagaagaagaaaaggattaaaacgtggaggagaagaggggagggaarggggagagagagaggaagagggagagacagagagagaaagtgaaaggaaaaactatctgcaaagctttggagttctttcaaagaagaaataagagaaaaaatatgtcaccacctgtcagaggataaaagaaagtaaaagaataaaacaggtaaaacaataagatagagagccaagaaagcacaaacaaggggcaggttataactgaaaaagtgtgtagagaaaatattatggaaaggcataggagagaggccagataaggggcctgtttgaaaatatgtctctgtttccctgctttaaactcctaaccagccatcatagaattcatcagcaagcactgaatgatcatgtacaatttgctgggcacatgtgttatgtgtgttcccacagatgcatgttttaaggtgtgtatcccatttgagcaatggtggataagaggcagaagtggaacagattctcagaggtacaggctttcagaagagggaaagatctatgtcagctggagaactcagaaaaggattattaaggggaatgagggttcagctgatcttagaagtttgagcatgaccaaaacatagagataaaggctgagatcactcttagtaggaagagaagaagaaggacatgtaaaggctggacttaatcaggaaatctgtagtacgggaactgcagttgatggaaggatttgatggagggagagaaagagagaaaacagaatcagattagagaaagtaaaggaaaaagaggaaagaataagaaaataaaatagagagaatgggggcgggtggagaatttaaaaaaagacaaactttcagagacttacagattttctgggtgtagaatgatgttgttggcctcacagggcactgctaagaagagctggccctgctctgaggctaagcttctgtaactgtccacttggagagttgtaagctgagaaagcacaggctgacccttggtcagatgtcctgaattgcagtcaggttggcagtgaagccatgtgataaccctgaacatcaccagctgaaatgccagtgttaaaagagagacacaagccattatcagtctaattccaacatccttaccatgtctgtttcagatacattctgtctattcaaattctgtgttttttttttgttgtcgttgttgttgtttttgccttttagtatgcttttgtattctgttttttcttaataggccatgatataccatgtcaaagggactgctccaaatagtcctttagtaatgtggcaataagttgtggatgtgggaagtattctacagcaggtcctgaaataacatcatttccttcgacatcattttgttataaaacctatgagaaaaaaaattaattcccagctggggtcactgtctatgtggagttggcacgttctccctatgtctgcaggttttttcgcaggtattttgcagtttccttccacatcccacagctgtgcccctgagatgaactggcatgtctaaacagtcccagtcttaatgagtgtgtggtgtgtgtgtgtgtgtgtgtgtggatatgtgtatgagtgtgtcctggtatgggatggcatcctgtccagccacctgagattctgaattagaataaaggagtaaataattatcttgtttttattaatctttgggaaatgtacgtatagctcatatttattttactgtttaatattagaagtgttttgggttttatttagaagtttgaggatgttgttatgaccagaaatatgccataggaacttaactcttgtttatgtcaattagcctgaaataaaattggtgtctttatagtctgttcacttaaagtcacaattttcaagaacctatctgtgactttgatgacatactgtatagttctctgattaggttagtcttttggtaagcatatgtatgcctccggactgagattttacgwgtatttctcattgtttttctctccccctaggtggagcagagtggctggagtgggcttgatttgtgtgtttcccttctcattggaaggctagacctgactggagttgagtatttctcttcccccaggtcagttaggctgtgataataccccagcagcttaggttctggttaactagtttcccttgagtgcagtcctctttaagaagaacagagtgttctgctgtatttcaaaatggttccttttcccctccctctgctggaaacccaaggggatttttctctgatatttactgtaagaactgggttgagtgcctggagggaaaactcacaaaagtggagggtgggcagtgtgattggtctctctggagtttttaactctcatgcttgtttgcactgagcctccagcaattcagcaatttgtcaattactgttcagatgctcctaccccagccctggttctcttggcagtttccaccgtgcatttctgctccagtaagccttcattccctgtagttgcctgtctgtctctccaatcctggggacaacagcggtttgccctgtgttctaccctttcttcctgatccagcaagagtttgtttttccatccatttagctttttacttgttagaataaattgatgacttctaagctctgtaggtgtggaaccagaaacaataaatgcaaccgaagactttaaaattgaattttaccaatgtatacccataccagcagtgagtgttccagataccttcctccttatcactacttaatattgtctgtctytatcattttagtgattttggtgggtatgtgtagaataatttcacagtgcttttaatttacacatcacagataacttagaaatgaccatattttttatgtgatgcttgtcatatcttctgtgaagtggtggttcaattattttatcaattttctattgggttttagcctttcaatcattaatttgaagttattgtcatatgattgttatttgattggtatatgttcgtaattgaatatatgtattgcaaacattttctccttgtctgtggtatccttgttcattctcttaatagtgttgcttaatgaataaaagttcttaattttaatgaaatgtatgattaatgttttattttgtggttagtactctttgatatatatattcakgtaatctttgtcttccccaacataatattcctcaattttctaaagaagatatacttttaaaatatttaatttatgatcattttcaaattgattttttaatgtgtggtgaaaggagggatcaaggttatatcgatagataggtgtatatataatacatatagatacagaaaatgacctagtaacagtattaaaaggctttcctttactctcggaatgtctctgttaatttacaaaattattaattttaatatagtcccgtttatcaatattttctttgtttaaaactttgtggaaaaaaatgccaacctctgtgtcacaaatatatacccctatgcatttttaaagaaaatttaatatttttcatttataatttacatttgcaacctaactggaagtgagtttttattttctggtagaaagaagtatatatgtctgtatatgtgtacgtgtgtgtatgtttgtcccaacatggatatcccactgatcagcatcctgtattgatatattcatcccttcccttttatactatagaattctcttttgcactatagggagaccatatacatgtgggtcattgctgacttttctactgtgtttgaatgttctatttgtcaatctttgtgccagtaccacactgttgctattatactagcttatatttaaaagtttttttcccgtagtgtaagttctccaggtttggtcttcctgaagattgtcttggctattttttcccactatgaaatgccatgtgtattttagaataaactcatcactttcataacaccatgatatctataatgtgattgtattgatattataaaaatttgagagaagttgaaatattttcacaatagtgatttttccaatccatgtaaaagataaatgcccacattaacataactttaaatattttaaagcaatcacatgtgattttttgcatactgttggatactttaacgaagatttattcccaaatatttgatgacttttatgccatttgaaatagtattgatttttaaagtttctggttatatttctttgttgctgatatataaactgacttttatatataaaccttgctgccttgctaaattcatttattaatttaatatttttatgtaggtttcttttagatattttaaggacatatgcatcatttgaaaaaattgagatatttgttttttcaaatttttgtaaattcatgccttttatttattttttcttatcttattgaaatggttaaaacctccagtaggttaaaccaaggtgattatagagggcatacatttctttgtccataactcagcaggaaatcatttaatatttcaccactcttaatgatgkctgatcatattaagtactcattatatttaatatcaatataaatctgaaattatcttycattacttaatctatattttttgttgataagtcttgatggggagtataattttattattgttatcaaagaaacaacttattttctctatttatttcaccaagcaaatgttaaattttagtatcatgatagcttcataaatttcttattttttgtgtgattttgtttgtttgtttgttttaattctagcttcttacaatgaatgctttacacaaatccatggccccataacatatttctaccataccaaatggctgagtgccttcatttcagagttgtcccagtcctaaatgtctgctgctagaattttctaagtagatgtcttgcctgcaccatggccttctatgctatcctttctagaccttaaaactgaactttcaaccccttcgtctgggtgtgtactcaggaccaaaatgtggttgtaggttcagaacatcctagaccattctgctgaaatcttaagttctacccatgccctctgcacaaatttattgcaattatcatattaggaaggcagattgttagctctactctctgttaaacataatacccatttagctctgcagacaatgaacttctctatgagtctgcatgcacgcgcgtgcacacacacacacacatacacacacagctaactgagcagactgctgattcctcaggatacacaatgaataagttaatgtctggctcagaggaggtactccaaaatacgacgaagaaagagtgaatgaatgaatttgaaagtacctgtttacatcatgacttattgatttattcatcaaatacatagtgaatgagtaataatagttttgcagcttcagacatgaaagtagtggaaaaaggtaaagcatgtataaataggcacaagatacaggttttcttcaattgatttactattcaaggaaaagaaaatgaaaaaatacatggcaacatgaaaacactgtcatataagtgttgtaaaatatggagtatggcaataagttaattcacttaatgtataaaatattgcatttaatcaatttgtgttaaattcccaatctactccaaaaattgtgccagttgctgttagagaaaagatgcaaagtacagagatatcagtgacacaatccttggtccccaatggcttagaatcaaataaggaagaaaatgcatttaatatataaacactaaggtatttgtaaaaatgtggtttatgtatgtcttatgcattacatgctagaatatatccattgcttcattaatgcagtcagcatccgttaaggcccaccatacattgggtatgtgtggttgtactaagatgtgctagacttcgaaggcaatcaagcaatatttctaggaggcaacatttaataaggtaggatcgaaataagcagaatggtcaaggcatttgaagtagaataaatggcataagtaaaatttcaaggacaggaacaaaaaatacctgggcacacatattgtttratttggatgagaaagaattataaagtagacagtaagaagaggagattgggggtaaggagaaagagttaaagagtttcttaagrtcccagccttttcaccattatagaaagactcactttaagrttcatctgtaggttcattcayggcatttagcattctcagatgagttcaattcaacacaacacagtgaaattcaatacaaattgattgaatgcaagattttatacattaaggaattaacttactgtcatgatgcatgttttataccactcatttagccatttagtgtttggtattcttcagaccagtcagctgatctgtaagctgggttatgactcagaatttcactcacagctacacaaagtgaaacagttactcacagaaatttgagaccacacagtctccattctgtcaaggaggttctctctgggctattagttgctcagagaatcatattccctccatgtgatcagctcttattgatggcaaaaaagacaaagcagaatactttttacgattagaacctcaaaaggagcccgtaagtgtgtgctgtgtcgggagacaggcttgagtgggataacaatgactctggataagaatgtagatgacagtccatccaagagagcacattgtctgttttctctccgatttttggcagcccgtgggtgggtacatgacctcagcagagaagcacacaaaattgatttataaattattcatatatcatgttttaattctaaaagctggatattaacttgactaattggctctcagttggaaaaaaaaagaattatgagatactagtttcatatttattagccaattgtaagcaataatttcagcaaaacctaactcagaaaaatatattaaacgttcaaaatctttattaatatgtattttattcttttaaattatttgactgcataattattatgtatactgagagaaaataaaaaactcaagcatgaagaagaaaataaaaaatattcataaatctaccatctaaaaagcgttgtaaatttttctatgtaaaactacatatttttctccaattttttttctcaaaaatgggcttataatatagtatcctggaacttttgaaagcaactaaataagataataccttaatagttttatcatattgcatcacatagatgtgtcataatttatttagccaattacttattgttgaacattaatgttgttcaaaatgttccaatactataaacaatgtagtaatgaacattcttatatttgtagctttgcacaactctccaactatatacttagaataaaatatagggtgtactcaaccaagaggtgtaacacatatattttactcaaaatttcagctaattatttccatcctttttatcatatgctaagtctgtagcttaacttatgtcatgagtttgtatacagatatataaaaacatgaagtaactaaaatttaacaaatacaaagcaaaattctacttcaattttcttatcaggttgtgaatagacttgytgaattaacttctaatattcatcttctttctttggtaagttgatgaaatgatccctattttaaatagctgctgaaataaccaatgcttgtgaaagtgtttgtatataaagagcttttgaaaaaaaacatggaaaaatttttatctatgcttagactgcataggacttgtgactcagttttaagaactgcacatgaatttgaaattgctatttgagatataaacaaaaaactcacccaggaccaatgaattcttggattcctggcagaagaaattgtaagacttctcagtagagacacaygaatgcatggatcagccataggaaaaaataactctacataagatgagatttaaaataatataaactaaaatttacaggatgtaactgatacaggagggggcagggaagtgctggtaagggmagggcgtggtccttggtttggggtccaccccggggcctgtgcccacggacctaggtgaggacaagcatttatgttttcctgccgaaatgttgcgtttcccaagaccacctggcctgccaaggtggtttaacatcttccaataatttgacttcagtattccctgctggttccttctcacatacacactgaagaatgctttctcagcctgatttccatgtctgagtcacrtgcagtccattttaatgtcaaccccatttgtgtccccagcatcagctcctgagctactgcacttctccagtgcttaggagtttagctcattaggtgctaaattactagcaccagaaagtgacaagtttcactttgcaaacttttaccaccataaactcactcaataaaaacaaaagaagccatagagaagcagggtttgggggatcataaaaaaaatatatgtttcaggcagtttgtatttatccaagtggcagcattgagttaatgctaaggaagtagacagcttcagttaatgagatgtattatttagggaaaatagagctgtcactatttcttgccatgtaaagcagtggatttgttacttttgaatgctggctgcattaaccaaaacatcatttattcctattgagatgttcccccagagctgcactttggttaataaagataaaccttcatgttggttgtcaaacgatatcttcccatcctaggaacccttccaacagcaacctgggcacttattccctgaaaagatttgcttagtgtaagatcttcatgtgtatttcagagcttcggtggattcccttaactgacctctggagcactttctgtgacaatgtgagatctatacctgtgtggtttgctgaagcatgaaatctaaagaaaaccacaaacgaacaaaaaatttaagaatttcagccccataacaaacttgcatgttttcattggacaattatccagcttccagtctccctctctcctcttcctagccaaacttccccagatgtctcttccccttcctcacctctctcttgctcccaaaccactctattttagctacagcaccatcactccaccccaagaagttttactatagtcaagaatgggctccacgtaactaaaccaatgagtagtttcagctgtcttcatttttcacctattataagtattggacactattgatacatcctgcttctttaaaagctatatccagttagtttccatgattctatactattctagtttccttcttatctctatcgccaagtttattcctcttcacccacagtcattaaatgctgctgtccctcaaggctcagtataagctttgatccttcctctttctatcatctctctctagaagacctcacctacagctacagccttgaatgccctctttttgcaggcatctcacaaactggcccgtgactctaactcagacatctcccccaaactctggactcacttaaccagctaaacctttgacatctcccaaaagatgtctcataatcttcatcagttcccaaaatgtctagtctaaatggctgagtttctttcccaagcatgaacctcctccaaaatcactatgtattcttctccctcaaaccagaaacttaggtgatatcccgaaaatagccccccttacgtttcatatcaaatttatcatacatattatctatttttccccttaaatattgttcatatctatccaccttttttttcattttcatcccttaatttagggcccaccatataacaggaactcaatatttaaattttgaattaaagaatcactaacgtcaacactctagtaaaagcctagcctgctgcaagagcttctgaattgatctcttcagtccagatttaccccaatacaacaattctccactttcccaattagctggaagctttatgcacacaacaaaaaatagggttgtcattcactttttcccactgtaaatgaaatgttaatcttcaagaaccacatcaattatctgagctctctctttataggcccatcacatcccatgctctgtcatttccctcattgcaacaaccaccaggctgctttaggccctttccactcaacatactctctacagacatggtgtcctctctctggtccagtcctctactccaccccaatcacctcctaattgatgcttactcatcctttatatccaagctcatttcagcccatttcttcagaaaaattcrtaacaacctccctgacaggatcaatcatttctatgatgtgctataaaagcacaaaaattaaatgctaacttgttagaatttttctttatttgtaactacatttaaaatatatttctgagagcacaagttcattaggacaaggatgtcttcttatattcaccattgtttccccagaaacaaatagctcaatatgtttaattttacatgtatatgtattttatatgaatatgatttggcttatgtaatatatgtgtgtgaataaatatttgtatatattctttttaatgtatattttatatatatatgtctatctatattgtggttttagacaattttatgtctctggggctcaattttctcatttatttaatggggccaaaataataatatctaaaatcttgcctgtgtagatgtaacagaataaaatattaacaattttgacaaaactgatattaaaataataattacatggcaaaaaataactgtatactcaaactcaaagcacagcagaaaaactgtgagataatatttgcaatatatatcacagataaaaattcatgtccytaaatataaaaaactttttgaatgagtgaaatattatcaaaaatataatagcaaatgggcaaaagatataaatggatggttcacaagaagaatgtaaatacaaaaaagacatttaacctccctcataatgagaaaaacgaaaataaaactgtactgacttaccctttctcaagtatcagataggcaaaaatgaaaaaaatcatatgacaacatactcagtgaagatgtagataatagtcactctcatacaattcagtatgaaaaaacattagtaagcaccttatgaaaatgaactagaacttgtcaataacctataaaactacatgtatgttcacatttcagaccagaaatcaatttctaaaaattactcctgtagatacatctccaaatataaaaaaatacatatgtgtgaggttattaattacagcattgattataaataaaaaatactggaaacaaactgggtgctcatacataggagggagattcagtaaactaaggtatatccacagaatggactcaatatatccagaatagaatgatgaggaagagaaagatttctatgacatggagtgattttcaagaaatacagttaagtgaaaaagccaaaatagaaagattagaaaaagcatactgttcttagccaagggaatcctaaaccaaaagagcaaatctagaggcatcacattacccaaattcaaattacactaaaaggctatagtaaccaaaacagcatgggattggtgtaaaggtagatccacagaccaatggaataaaatagagaacccagaaataaagccaaatacttacagccaactgatttttgacaaagcacacaaaaacataaacttgggaaaagacatcttatacaataaatggttctgggaaaattggatagccacatgtagaagaattaaactgaatccatatctctcatcatatacaattcaagatggattaaatacataaatctaagaccaaaaaaaccataaaaattctagaggaaaacctagaaaaaattcttctggacattaacctaggcaaagaaattataactaacaacctgaaaacaaatgcaacaaaagcaaaaatacataaatgggacttaaattaaaatgcttccacaaggcaaaagaaaataaccaacagagtaaacatgcaacctacagaattggagaaaatattttctatgcatccaacaaacaattagtccccagaatctacaaagaagaacttaaacaaatcagcaagaaaaatacaaataatcctattaaaagggggcaaaatacataagtagacatatctcaaaagaagatatgyaaatagccagcaaacgtatttaaaaaatgttcaacatcactaatcatcagagaattgcaaattaaaaccacagtgagataccacattaccccagmcagaatggccattattaaaaagtcacaaaacaatagatagtggtgcaaaagtggtgaaaagggaacacttatacactgctggtgggaatgtaagttagtgcaacttctatggaaaacagtatggagatttcaatttctcagtgaacaaaatgtagatctaccattcaatccagcaatcccactgctgggtagctacccaaaggacaagaagttgttatatcaaaaaagatacttgtacttgtatgtttattgcaggacaatttacaattgcaaagacaaggaatcaacctaaatgcctatcaactgaagagtggataaaaaaaatgtggtgtatatatataccatggaatactactcagccattaaaaaaagaatgaaataatgtcttttgcagcaacttgcatggaactgtaggctattattccaagtgaagtaactcaggaatggaaaatcaaatatcacatgttctcacttataagtgggagctgaggaatgggtacaaaggcatacagagtggcataatggactttggaaactcagaagtggagagtggggaaggggatgaaggaaaaaaaactatctaaagggtacattgtacattactcaggtgatggtacactgaaatcctagacttcatcactayacggtttatccacataaccaaaaatcacttgtagctctaaagctaatgaaatagaaaagttaaaataaaaaaaacacagaaaaaatactaacaatcatgcagtttaaaaagaaggaaaagtactgaaattccttgattaatatctatcttttctgctagcccataaattctgtgagaatggagattttctctgatttgttcaccacttatgtacagtacctgaagtatcataagtgctctataagtgctaaaataaattgaaaaaaatgcagatatgtgtttcaacacattcaaatacaataaaaacttctatatatataaaacatatgctattttttgtgtaagaaagatgggggagtgagaaaatatggatgtatctttttattgtacatataggaaagattctttagagattaatgaaattggttagttacattgcttgggtgagaacaatggaaagaatggaaggaatggggatagggtggagaatgaagcttctccaagcataccatgttgaaccrtctgacttttagacccctgctaatgtttcaaataattaaatgaagggaaataaataataaataaaacaatatgtggggaagtctaaaacaaaatacaaacagaaatgcattttttaaaccatatttggagaagtcatgtaaccacactggaggaagagaaaaaaaagaacaaaatcaggtaattttcaacagcatttagattacacacttcaggccaaagacaaaattaactttggaratatgttggactctggttagtaggtttctttttcacagatagatgggttaacagttctaaaactactttctgtgtattctagatctaagcaaataagtaaatatattgtagatactagaagccagatttctcattgtcagagaaggaagctttaaatatggaaatgcggaaggatagtatgaatgctctagtatttggaagaatgagtgtgaactggattttaatacacataaataaagaagtagttaagaatgctttaggctgcatgtatattcatacatatgtgtatgtttgtgtaggattttgtgtatatatatacatatatatctttaaatgtaaatctgttaagaaatacatatagatataaacctatgagtgtatatgtatccttgtakatatatttgtatatctatatggcttctaactctatccactgagagagcctagaagcgataataccctagtagcaatgagcatacctagtagccacatcttgatttctaatcacattttccacttaaaaagtccagacattttggataaacggctgatttcagggatagagtggaacaataaaagatgtacctgaaatattattttgtgtcataacgtgatgaagtgctcaatgaatgccagttctgtggggcaacacttgctaaatctgggatcatttgagtatatttaaacccatgatagtaaaaattttaatccatacaataaattaataactcatgagtccatgtgcataacaataaataaataaataaataaataaataaataaagctcttctttacagcagacattaaagtaataaatgtaggactgatggaattagaaaatcgagtggcagtcattattgtaatccttgtctgaggcaagactcctcaagaggtaatgaaactgttaagtaaaatattgacaagtaactatttgaaaggaaactacatagtttcaaaatatatctttacaagttattaattaaaaaggggaagcataagaacctgtaccttggagaaaccaagtgatcatagtgaatatcaccagaaaggtggtaagcccayaccacgttcctccgaacgtgattcaccgagaaggacagaaaaatcccttagtagaattccaggcaataatgatctgaacctaatcatttagaagtatcaagcagggagttgtggctcgtgcctgtaatcccagcactttgggaggctgaggcgggcggatcawttgaggtcagcagttcaaaaccaacctggccaacatggtgaaaccctgtctctactaaaaatacaaaattagccaggcatggtggtgagtgcctgtaatcccagctactcaggaggctgaggcaggagagttgcttgagcctgggaggaggaggttgcagttagcagagatcgygccattgcactacagcctgtgtgacagagcaagactctgtctcagaaaaaagaaaagaaaagaaaagaaaagaaaagaaaagaaaagaaatatcagacaggcccaatttacgtatattctacaaaatacctgcattttatttttttttaatgttagtatcatgcagtacaaatttaagaaggcttctggattaaagaaaattagggaaacatgataactttttgcaacaaataatctgattttcctctggaaatcattggaacaatggtgaaactaaagaatgttgctttaatattaattttctgattttgataactgtactgtggttatataagagaatagtcttacttctaggaaatatactgtaaaggaacaaaggggcatcacatctgtaatttattcttaaatgtttcaaaaagtatgtacacgtgtgtctgtgtgtgtgtgtgtgtgtagatatcgatcgaggcatagatagacacatggaaaagagagaggaagaaaacagaagggcctgtagagagaggaagtgagaatgagagaacsttttcatgtgagtacacacaggaaacaaaaagcacaagaggaaatgttaacatttggggaatctgggtgaagagtatgtgaagatgtcttkttcaattcctacaacttttcataagtctgaaatcatgtccaaataaagtttaaaagaaaataaaacttataattctatgcattagtaaataatcttctggtcctggtcaaagcccaaatggtaacatgatatgactaagataagacaatttgtcagaagcagagctaggtgtagaacaaagtctcaggtattctttttactaaacaacaatcaacaagtcatcagttttccaagtcctgtcttcttatgcccaaagcagatattgataatcagttaatagagccatggcgcggtctcagtatcctcctcaattcattgcttcaggcaacctttaagattgaaacctatttcccattctaaatatcacacctcgctccctcgaattcatactgcagtggaactatctcacaccagaatctttacagaaggttgctttttaggtggtaacagaaatgaagtacaaaataaaattttctactttgaaagcaagctatgtgctataattaaataaattttaataacttaggactaatctcttccttgaaacagagttcttttggtctgaatgcatgtagacaaccccttgttccttttgccgcagccgggcgaacagggccctcactttccccactaatgaagcagaaagaggagtctgttaaaacatcctttcaggtttggcttaaagttctaagacattagccattggtcattgatcgttgcaccttcctccaccataaactccactttgagcctagaatgctgcttcagaatctcagtgtaatgacccagatcatcatttcctatgtgagttgacactgtgataaaactcacatgcttttacagggattccaccttcctaatttaaagtcactataaagagtaaatgacttctaccagattctttcatgggatgtggctgggggtgaggtcaatgagaatgggagaattaaggtgggaaaataaaacacctgaaggacattgtatgattaatggaagggaaaagaaatctgagagctgagcctcaaggtttcaaagtcatcctctgctgattttctaatatatcagggtgtctgaggtagacagctgcatttgcatcttaaagtgtaggtcagattatgccatcctaaactacggtatatttttgcagcatattctagtctcaagcaatgggtagagttccattgcccaggtagccgaacattaaagggatgtttaagagtttctctctctgcctttttgagaaccatgttttggcacagctacctcaatgacacaaggctatagattgattacatgcatttaggccaaaggaatgctatttgcatggaagagactggtctttaattactgaaatttgtttaataatggcatgtctttcaggggaaccaacatgtttatgtattaatcctttaagtagtagtcttggtccctaacttggaaagtgcaaattggcaacatttaactacttcaatccaattccccaatctcatttcccaaattttctccactgagagctgccagtgcccccagggtgcatatttcacataattaagctttatagctagagcctgttctgagatggtcagctgcctgaatcccattgaaaatgcagacagaacagaaagtgcaaggctgattcacacttttggatgctcagacattgccctggttgctctccggtttgaaacaattggaagggagacttttattctgcataggaaagactcagtcacgcccctgaggaaggaagtcatcctctggctggtaccaacacaaaattgaaccaaggggcacataaattatcattatcaaagacgatcctatatttataataatttcctgtatcttattgtatttcttcatcttcaggacaaggctgcaattggtacagtctttgtggccattttttaggttaagaaaatgagaatttttctatatctcatccttttgctaagatggtttaaaattcagattttctgactctaaaaccagtgagttttcttattacacctctaacaatgttattttccctgctaattctttgatatatttacacacatgcacacacacacatatatatcctctccttatacaggggtcagactgcggtataargctggtggtcttagagagaagggcaggtataatgtcggagacgaatgcctgatatcggaggagacatcagtagatagagtctcctgtgatcaaagattactaagttcattctgattttagggcagagatggtctacttacagctggtagggtggatctgggtccatagatttaactataactgtaacgaagacagagtttcctggaacaccaagggtccttatgttccatattccttccagtaccagcacatggcagcccaaaataaaaatggtattgaagtaattggaaatatttccaataaagcaccaaagccaagatttgctatttaaagctcagtattagctgaagccagactttccttggaaacacatacacacacgaagatctattcaatcgtatagagataaaaatgatgaattggcagatgcacgggtttaaccatttgtaagcagggtaggcaggattggggcagtacctcccttattcccaaactctctccacattctggctacctcaccatggccacacaatgccttttccagcaggtaattgcctgaatttaaggctgcacgatattttatgaggaaatgccactgtcttttagattatagcaaccaagaaaaaagtactaaaagcctgaaacaacacagtgttgctggtggtatggccttcctagaccccagggccatccttgataatattttctgtgttctctaatttcatctctgccaaaagccattaaggtgtatcagcagccataaaaggctgactcccagggaggaaattgtaagaaacatttctggggttaaagttagcctcacaccaaatagtcctatgaggaaaaaatacagctgacagatttataggatttctcttacaaaagagaccttgctggaccacaggtagcaatataatctgctgaattctcacactgcagggccttgctttatacaagagtaataggttttataaacttaatctcattatatccattgaggtaattcactagggcaattcaatatgtgaaggaaacctgcagtgaacattctgaaaacttaaagacgtgttttgttttctttattttttagacagctttgatacacaattcacacactgtacaatttgcccttttaatataatgccatggtttttagcatatttacacaatggagcatccatcactacaatcaattttggaatattttcatcgtccctccaaaaaacactgcacttcttggccttcaaccaaatctccccatttaccccagctctcctcagtaatatatttctgagttgatagatttgtctatcctggacatttcatgctgcagcaggttagtcctgactttttatcataatggtcatgaggttccatgaaaccgagagaatagaagcatgaaaggtctcttgaggcctgggttcagaacttctaatgcattctattggccaaagtgagttaaagatcagcccagattcaaggggtggaggaatatattccaccagttgatgatgaatggagaagccataaagtcccatgtcaaagagttacggagaagtttgggattcgagccgccattaaaaaatagatctaccattgtgatagtatattttatcaaaattctgcatgtgttatcatcattcttagttaaaaacataagaagatatattactaaatagtctggcactgcatactagtctttataaaatgacaaggcaatatctgtggcatctaaaccaaacacctatatactgataaaattttctctctaccttcccagcaaagcattctctccaaaggtacctctcaatgtatcctgggtctcatggacaacaaaattaaactcattatttccttcagaaacttatctttttcctcctgtattttatatttaaatgaataatacaatcaattatccagttacctaattgtgataccaaggaagtatttaagattcctattcccggctggcttaacgcacattgttcaacaagtcctacatctytaccttcaaatggctgttaattcttgcttcatctctgcattcaaccgccactgcattattccaggatctctttattttcaacctgaattatacaacttttggacttgtttctctgttcctgttctcatctgtctttaatccaaatatccacagttgtgctggtgtaaatttactatattatggcatctctccagctaaatgtcatccaatgatcttcaactatttcccacttaaaaatccaggcttcttactacagcattcaaggtcttctctgatctgaccccttcttgcccctccattgtactttcattttcttactttgctgtgttcttgctcagctcacatcatacacatctcatcatacacttctatttgcctcaatgttcttccctctagtgtcataggggagggaggacccatggtatttaagagcaagtayattagagttagatactctgattctgactctaagaatgttgagttcccacttaatgatgctgagctacccttttcttattagtataataaaatggaaatagtaatgacatctacctcatagggttgtttagggtattaaatgtaatagtgcatgcaaataatttagcacagttacttgcacaaataagcattccataatgttaaacgtcaatattaatatttctatcacctcatttttttgcttctgaagacccttttcatgtttcaagacttaaagcttacatctttgagcacccattttggaatggaattctactatcccattctcattcttccagtgagttcccatcaaatcctaggcataacttcactacagcatttgatacataatatggatttctcctctctttttgtatgcctgtatcccctccaaaacctataagccacctaagagcagggattgtgcttcattcagctttgactgccttgtgtcagtaaatgcaagattcccttgtgaagttatggaaaatccaggcccagctttagcagaaatgagtatatgcagtcatagatggagacgtggctagggaattagaatttcttggctcagtggactttatttactcaatcaacttccaggtcatatcctgacagctgagtattgaccaacagaagagcttgtaactcaggcatccttcaggaaccttggatcaaaacaattgtgatcctgccaagccttggctcaaggcaaggacaattgcctttgattctaaaccatttagggaattccaaaactagtgttagtcaaggactcctatataggtttatttattatgaaaaatatcaagactgagaaactaacattttgggaaattactattatcaacatctgatagaaacaggatgaccacattttgttgaatgtaaatttccaagagcaaaaaacatgggaatgaggccgatttcccatcttaagcacgcaggatttcaaatcaatttyttattaacttgataacattgctttttctagaaaggtcactattttttgtgttaagaatatgctcttggccaagcatagcggctcacacctgtaatcccagcactttggggaggctgaggcaggtggatcacttgagctcaggtgtttgagaccagcctgggcaacatggcgaaatcccatctctacaaatattacaaaaactacccacctgtggtggcacatgcctatggcgccagctactcactcaggaggctgaggtgggaggactgccggagcgcggaaggtcgaggctgcagtgagccatgatcatgccactgcatctagcctggacgacagagcaagaccctgtctcaaagagaagaaatatgctctttaaccttcaggtagtatctgcaatttgtagagaagattgttttcccttatcttttatttcttattctagtctctggaacttgcttatcaatcagaaatgcatttgagggattgaatttaagcaatacatttaacatacatacctcttagcagggtttttcagtataagtctcattttcatagattcttgctcttgattccaaattatttttgtgactcttttcctgattgtctgggttatctggcaattatttgtagactcaggagcttgagagaagtctggaatttctgcctgccaatttgtagtttgactttcaaaacccagctctttgcttttgttcttatttatctttcttaaataaaaaaaataaaaaaaaagggccaacccattttttctatttgtctttattccagagaacatggtttatataaactatttaactattgcaaaaaacacttctgatcctttcgtttcctataaagggagtaatatttcaccatctccatgatatgtttgtatcctatacaggaagaacaatgagacatggagtgaaaaaatttccagtagctctactcctttatcactggacagacaaatagctcactgcatgtgggttcccatatactattttattatgaaagataaaacatttagaaagagaagacctcttataatataattccattaagctctcctcacctcatatttttatgttttatgtttatttgatatcattttatgtaattatttgctgtagtgctctgatttatacttaacaaggtaattgtattacaaaataaatgaggcttgaattgatttgcagtaaatgtatataaaagttatattcttggttgaagttcaaatactgtgggaggagtaagaatgcagaaacacatgcccatgtacaactggcctccaccacacacattatacaccaggttttccttaactgggaccatagaggactaaagccatactgacacatacattatgtctccatactgtatataaacataacatctaagtatttatgaatattctcttccctctttcaaaacaaatacaccacattaatccctctttcttgtccttgagctagaacttatatatttctcccaaattttatacaaaatatagccaaatgtgacattaagcttttctccaaagccatgtatatttttaaaaattatacgattatctgttaattatctacatttatttactctgtgtcataatgtcaggactgaattaggcaaaatatatttttcccccatccaaaggcttccttttagaatctgccaataaaaggcaggctcctgaggaagagggacaaaaagggatgtgtctccttttgtaactgttacatctgttagcgtcacccaacgaaggaatttaatgcagtagcaacacctgattcctgccttcaacttctttcagcactcttaaaaccagcttaggagcccctcagaagcactagcagtaagtaggctgagcagcatttcttggaaatccaaacccagatccacaagatccctttgaggatctcctgaatatcagcaacagacaagcaatacttactccagagaagtctcatccccagttctgcaaggtcctttctctaagttcttgaggtaccagcagtaactaggagccaacctgtcttcactgatcttagttccgcctgtacatgacccctactatgaaattcaagattttgataactctgtctttatccatttgttctcctagccttatgggtattagttatttcctgcagttactacttctatgttaccatgctgttccatttttgctctttcatcattctacatcttggttaacaatactctatgtaaaacgttcactgttgaattacagaatgtaatatctgtttttcttattagactctgatgtatactgtaccagtagtggccctagaaagcagatattcaaagtttgagattctggaattggtgtggttgtaaccttgtccttgaacacagaattggattacttacaaatgtaaaactggatataagttatttatagtacatagtttttgtttttgtttttgtttttacaattcatttaattatccacctgtgtaactcaggaattccacgtgggtttaaatattaccaaattaattgagatgcttagggatagaaagagcaccataattattattacaataaaaaaataagccagacaaattgaaattaattttatgagtttttaaaaattcatcagcaatcttgagttttcagggcaagcgcctagcccaaaattgaagaaaggtaggcatctttaggcagagatggtgtatgaatactggactacttgtgacaggcacaactggacaccaatcacagtacccagaaagggtccttggttaaattggcggaagctgatcatgtgctgttgaacatgtgaggcccctaaaactcacacaaactggagaagtctatgcccttttcaaggattcttctccatgaaccctgctgagtgctcacagacaagattggaaaaaagtaactaaatgttctttgtggtacagagctgagaggagaggggaacaggagtttatgcagagaaggatgctcctctatctctgctcaggaaaaaaagcctcaacctatgctgggaaggacagaaaacatggatgcccttagggcacaggtgaggattcattgcaactgaggaaagcaaacagatagaaaagtccctatcttggaaggtaggcaggaatgtgtgctgggttcagaactacagccagggtaagagcaggatcactgtgtaggggacaccccgaagacccaagacatggtgctggcaaagagaaggcatgaaactgagaatggatgagcattcagagaaaacaaaaacgaagccaaaagcctctgggaagcagcctcctctttaaataaaatgtacggctacagggatctgaagagtgtgatatgctggcagtaaccatcgcaatagaaatctcattggtcaaatttctaactaggttaattcaagccccagcactaaaggccaagcagaaagaaaatgtgcccaggcataaaagctgtttatctcagtctttactatcctttacaagatctctggctttcaaaaacaaaccacattaagaaatgtgaaaaagcaagaaaaggccaatactaccaagagataaaaccagtcatcaggatgagactaagatatgacaccgaatttagtattatctaatagatgatttagaataactatgtttaatatgataaagtttttaatggaaaagttgaataattacaagatcaaagtaggtagtttcaacagggagatgggaactgtaagacacaatcaaatggaaaagctagaaatgataagcacaataaaagaaattaacagtgacttcagcaggcttatcagagaaggaaagaatcaaaggaacctgaagatgtttcaatagacattttcaagcaaacaaaacagaagatagaaaaagagaacaacaacaaaaaaaacattaagacatgtatagaacaatgcatgtaagggtaattagaatcatagaagaagagatataaattaggctaaagggacatttgaagaaataatacctgcgaactttccaaacctaatgacrgtcatcagacaacagatctaagaatctcagagaacagaggcagaataaatcccaagaccactacatttagctatatcatgttcaaactactggaaataagagtcaaatggaaaatcttgaatgcagacagcaaaagggaaacaagatatcccatacagagtaacaagtataagaattattgaggaagtagtcagccattcttgtgtaaaaccaatcaatgtagatggaaatacaatgacatctttaaaatgataaattgaaaaacaatccagacaacaacacattcaacctagaattctatgcctagagaaaatgtgtttaagtaatggagaaacaaagactttctcatacaaacaactactgagggaattcattgtcaccccaattctacattgaatgttaaaaaggaggtttttagaaacaaggaatacgatatcaaacagaaacttacatctacaccacgaaaaggaagggcactgaaattggaacaaatgaagataactgaaaattacttttctcctttccattgctttaaaagataagtgaccgtttaaggcacaaatagttgatagcatatgcaaaactaaaatatctgacaacaatagcacaaatgatgccaagataaattagaagaaatacagttatatatctacagccataccaccctgaatgcagctgatcttgtctggtctcrgaagctaagcaaggttgggcctgcttggtacttgggtgggagaaaatataatgttgtatgatccttaaacaacacatgaagtcgtatacttgaaaattgaataaattaaatatgtaagatgtattcaactctaggacaacctctaaaaacaattttttaaaaatcattatttagaaaattaccaattacaacataacagaaaatgaaagtattataatccagcaaaatatttgaaagatctggatgctgaaaaaaacaaagctttgagaaaagaaagcaagatgaccttaataaatagtgaactatataatgttctaatgayaactaaatggtcagaattcaactctttgtcattgtgggactgaggtctctgttttcttgctgtcaagccaggattttctcttaactccttacagccacctgaattcctcatcatattaccccctccatctttataaatcatggtgtcaagtcttgttcatgcttcaattctatctgattttacttctgtcacatctattctgcctccagccagagaaaattatctgcttttgtgggctggtgtgattattttaggcccgtgagggtaatccaggatattctccccatcttaaattcttaactttaattatatctgcaaaatcccttttgccatgaaatataacatttcactggttctgagaattaggatgtgaatatattggggaggggaacattattcttcttaccacaaaaggaatcaataaaaagagtgaaataatagtgttagaaatcacacacgtgcacacacttatacacacacacacactatgaatgttttcaaaggacttttcaataatatcacaacaaaaagtcaacaaatttgagaataggtaggtcaatatcaattatctaaaatgaaataaaaggggccgggcacagtggctcacacctgtaatctcagcactttgggaggccaaagcgggtggatcacctgaggtcaggatttcgagaccaacctgaccaacatggtgaaaccctgaccctactaaaaatacaaaaattagctgggtgtggtggcaggtccctgtaattccaactacttgggaagctgaggcaagagaatcgcttgaacccaggagttagaggttgcagtgagctgagatcacgccactgcactccagcctgggcaacagagtgagaccccgtttcaataaataaataaataaaaataaaatgaaataaaaggaggaaaaaatgttaagaaaatactgaacagaacatttaagaattgtgggaaaacagcttttctctaacatacatgtaattggagtcccaggtagaggagaggaagatggttgtttcagaagtgtttaatgtgataatggccaagaatttttcaaaattaatagacaagaaaccacagatccacaaagttcaaaattccaattaagaacttggaaaggcaaaaacaagaaccaaacccacgaccaaaaaaaccgaggccagactaaaccaaaccaaacacacacacatagacacacacaggcattatcatagtcaaactcctgaggcataaaaatacaagaaaaatcttgaatgtagccagggcagggggaatatataaagtacagaagaagactatgtctgggtaaccacagatctcttttcagaacatagcaacttagaaaacaatgaagtaaggaacacctctaaattttaaagtagaaagcagagaaacaccgaaagaacaaaaaattacctggtcagatttctataaccacaaaaaatatgtttcaaaaataaattaaaaaaatggttttcaaacaaacctgagagaatcaattgcttgcagaactgaacaataaatattaaagaaatgtattcaactgcataatcatttcaatacttgcacaagcacatttgaaaaattctgttacaaaaaactttcgggggaggagccaagatggccaaatagaacagctccagtatacagctcccagtatgagcgacgaagaagacggcagaagacgggtgatttctgcatttccatctgaggtaccgggttcatctcactagggagtgccagacagtgggcgcaggtcagtggrtgcgtgcaccatgcgcgagccaaagcagggcgaggcattgcctcacttgggaggtgcaaggggtcagggagttccctttccaagtcaaagaaaggggtgacggatgcacctggataatcgggtcactcccacccgaatattgcgcttttcggacaggtttaaaaaatggcgcaccacgagattatatcccgcacctggctcagagggtcctacgcccacggagtctcgctgattgctagcacagcagtctgagatcaaactgcaaggcggcagcgaggctgggggaggggcgcccgccattgcccaggtttgcttaggtaaacaaagcagcctgaagctcgaactgggtggagcccaccacagctcaaggaggcctgcctgcctctgtaggctccacctctgggggcagggcacagacaaacaaaaagacagcagtaacctctgcagacttaaatgtccctatctgacagctttgaagagagcagtggttctcccagcatgcagctggagatctgagaacgggcagactgcctccctcaagtgggtccctgacccctgacccccgagcagcctaactgggaggcaccccccagcaggggcacactgacacctcacagagatgataacaaactatctctcagaccacagtgcaatcaaactagaactcaggattaagaatctcactcaaggccgggcgcggtggctcacgcctgtaatcccagcactttgggaggccgaggcgggtggatcatgaggtcaggagatcgagaccatcctggctaacaaggtgaaaccccgtctctactaaaaatayaaaaaattagccgggcgcggtggctggcgcctgtagtcccagctactcgggaggctgaggcaggagaatggcgtgaacccgggaagcggagcttgcagtgagccgagattgcgccactgcagtccgcagtccggcctgggcgacagagcgagactccgtctcaaaaaamaaaamaaaaaaaaaagaatctcactcaaaaccgctcaactacatggaaactgaacaacccgctcctgaatgactactggatacataacgaaatgaaggcagaaataaagatgttctttgaaaccaacgagaacaaagacacagcataccagaatctctgggacgcattcaaagcagtgtgtagagggaaatttacagcactaaatgcccacaagagaaagcaggaaagatccaaaattgacaccctaacatcacaattaaaagaactagaaaagcaacagcaaacacattcaaaagctagcagaaggcaagaaataactaaaatcagagcagaactgaaggaaatagcgacacaaaaaacccttcaaaaaattaattaatccaggagctggttttttgaaaggatcaacaaaattgatagaccgctagcaagactaataaagaaaaaaagagagaagaatcaaatagacacaataaaaaatgataaaggggatatcaccaccaatcccacagaaatacaaactaccatcagagaatactacaaacacctctacgcaaataaactagaaaatctagaagaaatggataaattcctcgacacatacactctcccaagactaaaccaggaagaagttgaatctctgaatagaccaataacaggagctgaaattgtggcaatactcaatagtttaccaaccaaaaagagtccaggaccagatggattcacagccgaattctaccagaggtacaaggaagaactggtaccattccttctgaaactattccaatcaatagaaaaagagggaatcctccctaactcattttatgaggccagcatcattctgataccaaagccgggcagagacacaaccaaaaaagagaattttagaccaatatccttgatgaacattgatgcagaaatcctcaataaaatactggcaaaacaaatccagcagcacatcaaaaagcttatccaccatgatcaagtgggcttcatccctgggatgcaaggctggttcaatatacgcaaatcaataaatgtaatccagcatataaacagaaccaaagacaaaaaccacatgattatctcaattggtgcagaaaaggcctttgacaaaattcaacaacccttcatgctaaaaactctcaataaattaggtattgatgggacgtatttcaaaataataagagctatctatgacaaacccacagccaatatcatactgaatgggcaaaaactggaagcattccctttgaaaactgcacaagacagggatgccctctctcaccactcctattcaacatagtgttggaagttctggccagggcaattaggcaggagaaggaaatacagggtattcaattaggaaaagaggaagtcaaattgtccctgtttgcagatgacatgattgtatatctagaaaaccccattgtctcagcccaaaatctccttaagctgataagcaacttcagcaaagtctcaggatacaaaatcaatgtacaaaaatcacaagcattcctatacaccaacaacagacaaacagagagccaaatcgtgagtgaactcccattcacaattgcttcaaagagaataaaatacctaggaatccaacttacaagggatgtgaaggacctcttcaaggagaactacaaaccactgctcaaggaaataaaagaggatacaaacaaatggaagaacattccatgctcatgggtaggaagaatcaatatcgtgaaaatggccatactgcccaaggtaatttacagattcaatgccatccccatcaagctaccaatgactttcttcacagaattggaaaaaactactttaaagttcatatggaaccaaaaaagagcccgcatcgccaaggcaatcctaagccaaaagaacaaatctggaggcatcacactacctgacttcaaactatactacaaggctacagtaaccaaaacagcatggtactggtaccaaaacagagatatagatcaatggaacagaacagagccctcagaaataacgccgcatatctacaactatctgatctttgacaaacctgagaaaaacaagcaatggggaaaggattccctatttaataaatggtgctgggaaaactggctggccatatgtagaaagctgaaactggatcccgtccttacactttatacaaaaatcaattcaagatggattaaagacttaaacgttagacctaaaaccataaaaaccctagaagaaaacctaggcattaccattcaggacataggcatgggcaaggacttcatgtccaaaacaccaaaagcaatggcaacaaaagccaaaattgacaaatgggatctaattaaactaaagagcttctgcacagcaaaagaaactaccatcagagtgaacaggcaacctacaraatgggagaaaattttcgcaacctactcatctgacaaagggctaatatccagaatctacaatgaactcaaacaaatttacaagaaaaaaacaaacaaccccatcaaaaagtgggcgaaggacatgaacagacacttctcaaaagaagacatttatgcagccaaaaaatacatgaaaaaatgctcatcatcactggccatcagagaaatgcaaatcaaaaccacagtgagacaccatctcacaccagttagaatggcaatcattaaaaagtcaggaaacaacaggtgctggagaggatgtggagaaataggaacacttttacactgttggtgggactgtaaactaattcaaccattgtggaagtcagcgtggcaattcctcagggatctagagctagaattaccatttgacccagccatcccattactgggtatatacccaaaggactataaatcatgctgctataaagacacatgcacatgtatgtttattgcagcattattcacaatagcaaagacttggaaccaacccaaatgtccaacaatgatagactggattaagaaaatgtggcacatatacaccatggaatactatgcagccataaaaaaatgatgagttcatgtcctttgtagggacatggatgaaattggaaatcatcattctcagtaaactatcgcaagaacaaaaaaccaaacaccgcatattttcactcataggtaggaattgaacaatgagatcacatggacacaggaaggggaatatcacactcttcagactgtggtggggtggggggaagggggagggatagcattgggagatatacctaatgctagatgacgagttagtgggtgcagcgcaccagcgtggcacatgtatacatatgtaactaacctgcacaatgtgcacatgtaccctaaaacttaaagtataataaaaaaaaaaaaaaactttcagcaatttggaagggaattttcttgatgtaatgaaggaaatatccatgataaagagcatctatgaaaaagttaagctaacatactgaatagaaaaatgttgaatgcgttctgcctaatattgagaacaaggcagaaatgctcctttttcttcttttatttgatgttacagcagaggttccagtcattgaaataaataaataaaaagaattaaaataaataaaaataaattattttcatgaagtcttacaaaacttgcagaacaactgttagaactagtaagtgcatttagcaagactacaaaatatattactaataatatctaaaaatcaatagtatattataatctatctgcaaaaaattaggcaagtgaaatataacaggtttgagtcaaaacccactcaatgtaccctttacattagtgtgtttatggtatatagatcttgcctaaaaaggagggaaaacactttacacaaatactgaagtctagttaataaatatttagaatgaaatataatgatgtatgcaatttatgtaagtatattaaaatgagatggatagagtatggactcatggacagatacatgataaaatacatatagtaaaatgttgtgggagaatataggtgggtatactaatgctcactgtaaacttgatgtgatgatgcaggagctttggggaatcaagtgaatgatgtactttatcactggggttgtcattatagctgtaagagctgtgggagcagaatgactatttgtaactactggaaagctcacaaaaagattacaagctctgggccttaaaccccttaaataaattatggtaaaagaattatggtaaaaaattatggtaaaagaattagagtacatcaatgatgtactctaattctctaactccttatatctgtaaggataaccttagtgataattaccctacacaatatgattgtttgggttgcagaattacaacgtaagttgaattcaaagacatgctgtgtctattatgtgatagtcaaggcattgatagagatgggatggggttctgaaacacctctaaattttccctctgaaaattggagggaacagttagatagatttagttgaggcaaataatttcaagactttgagtctctgcttctgtgctgacttcagaaacatcctgccctccaatatcaaagaagggtagtgtttcaagagcccccagctacactggggctccagcattagcacagctagcaactctgccctaatggaagatgaatgggagatggacagggtatttgcagtgtgcctttcacaagatacttcttatacctggtgaacatcctaaggcctggttgtccaaaatgtgagcaggggtcccaaacacaggaaacttgtttatactggcagacgtccctgtgactctttcctgacctgtgtccagtttatgcctacctggccttctctctggagctgggaatccaaccttgtgttctccctgatatgccatggaaacaatggcctggggtagctcatggtttttcagatgaaaggagcaaattcaatacatcaccacaataggaaacaagagcaagatttttacttagagattctgggcagagagggcacaatgagtcaggaggacagttttccacccctgggtcatgcaaggcaggaatgaagagtcaggcagagagagacactatgtacagcaactagcaatatatataacagaataggacatgggtcactttaagttcacaagcaaatgcccaaatagtcccttttaaggaagtggccccagaaaactcagtgtgttaggtgggaaagatgcctctaagctccactttggcataggcttaagccatttaggtgtggtcttctacttctaatgcctaggcagcaatctttcctgcattattcttgttacccgtagcctgccctttacttacaaatcctgtggtacattcactttgttgaaataactagtgcagttttaatttcttaactgctctctaatacaccattctaatacatctttttaaaaaattcttcatgagggccgggcgtggtggctcatgcctgtaatcccagcactttgggaggccaaggcaggcagatcacctgaggttgggagttcgagaccagactgacaaacatggagaaatcccatctctactgaaaatacaaaaaattagccaggtgtggtggcacatgtctgtaatcccagctacatgggaggctgaggcaggagaatcacttgaacccaggaggcggaggttgcgttgagccgagatcgggccattgcactccagcctgggcaacaagaacaaaacttcgtccaaataaataaataaataaataaaattcttcataaaacagtttcaagatcttttaaaaattgatattaataatcattctttttctttcatatttttgggtgttatttattccttacttccagactacatggcaggattttcagatcatactttactaaaaagtctagtgttaaaraaaaccccacaatatttcttaaatttagagacattattttatattacataatactgacaacataatttatacttttctttcctcttttatatgcattgtttcttacagcaatagtagctattgaggaaaccaactggtcaaatcaaactcattactttctacccaccccaaacatatacttcctctgtgtttcccaccaacaccattccaatcatgtaggacaggagccatatggtctcagttgtgatgactcaaactctgccactgtggcacaaaaatagctatagttattatgtaaacaaaggttatataaggtatggttatcttccaataaaactttatttacaaaaataggcagcccctgggaagtagtttgcctacccctgaggtaggtgttatacccaataatcatttttaactcttacgtccaatcaaatttcaaatgcatatcagtttatcaaacactcacagagtatgtgctctttactggacgtgattaaggtccagctcttatctctgaagcaagctgcgtagatatctactactatgtagtcttactgtcccactataaagagcctcatacttggtcttccatctaatttctttctaaacccttcagatttgaaggtattctctctttagaggtcacagatattttgtgccactgatatggctttgatgaagggaggaacaccaggttcttcgtttcgagttgaattagataaaatgacaccgatacacgtggagtggttttaaggagaggagagtttaataggcaaaaggggagaaggtagaaggaagaagctccccagtacagagacagagggaggggggctccaaagcctaaagaggagaccctgaattcggaggataccagccagttctatgcaaaggctggaggagatggtgtctgatttccatagggctcaggggattagtttgaccatgcatgtcgtttatatagaccgtgaaaaacctggccctcccatcccagttctttaatatgcaaatacagggcaccataatgttctacacatgtagggatatgtgggggcggccatgctgtcaggcacatgtaggggcaagggcaagagagcaacagtgggaattgccatgttgggtggacccggtttccaacggcttgcatttgcgtattaaaggttgccagcctgggtctaagaaccaggactttcatgctagacaagaaacacttttttggagctgtgaaaaaaccttccatgtaccccttttcctctctatctgcctaaaacaatttcttaataactcctaccacaccacaagaatatgtcaacatagcgcaagtcatggatacagagagaacggcatttcaaaggccaattaacttatttktcattaatcatcttattacagaagaacacaaaacacctgagtaagtggtaatgtacagcccaagttcccttttgttatttctggaaaggtcctcacctctagtataaatagggttgttttaaaacgtgaaatctaatcataatattattatatgacgatacacacacaggcatacacactaagtaaaggctcctgcctttgttatttatgattctggaaatgtaatgcatgcctcactggccctgctgatgaygtctgcaagcatctttgtttgatttttttaaaagctggaagcaacaatgctggatgttgacttgttaatgaagaaagagatctaagacctgagacctttacttagtcagaggttatttagcaaatctggttggctttggattgaaaaaaaaaatctattttcctatactggagagaaaaaggatgctaaagaggtgaatgaggttacctgatcatcacaaagtgcctatgctgcctttctgcaactaaggcattggaaattgaagtgtataataatacaggcacttcaccctttctgaaactggtcacactgatggtgtttgtattattaggtttgctttacacatttaccatagtttcctgcccaaccaactcctcttgagaaaattctgtgtggctctatgtacagctatgcactaaatattggcaggaagccaagcattaattggataaatatcaccccttctggaaaaatatttttcccaggtttttctcttgtatctcccctttccattatacctcgtccttgaattatctgtatttacatactacagaaggcacttcaggattcagggatgagttgaatgactggtaattaattgctctattggtgatagaagactttataggagccattgctcataaaactggcacaggtgttaccatctttctagaggcacctcttttctgacttccctaatcccttgattccaggcacaactctctccttcgggcacaacgtaatgtggattgggctgtatgtgtattcatgtttctatttcatcaccataaccttacaaagtatcactttactcatttataaaagggacaagcccatggaatggaagaagcattagaaaaggtaatgaatgaaatacaaatagcaccttgcatcccacaacatgtctgctcaatacaaggtaaacatatttaaagctatgttagagaattttaaacctgaaagaggccttgaggagaactgagtccataggttccactggcaggtgcctgcaacagaataaccagggatttcttgctccaaacactggtgctcagctttcccgtagacctagtgaatcagactgtctcctgctttcatgttttaaaattgtcttagatgattctgatgagcagtcaggtttgtaagccagtacatcatttactccttcttccaatgctcaaatcttcctctcaatggccctgttatttgttcttctagcttcttttcagtgatagtgaactgactgtctccaggaacaggcgtgtcctcatgtgacagatttgcacagttcttccttctacacacataaaagctgtcatcagtattgtccattcattaaagccaattctaaccatgggggttatgaataaacaaatttaaccactttttttttctgtttgaaaatgctccagttatatgaaaagatttattttcctacatmttttctcccacgtgtctaatgtatcctgataaagcccctgtcctggagtcccagtttcttgtttactagattttaccaaatgctatttcattgctagagtttcagtggccttatctttatacttttctgataactgtccctctttaaagtattttcaatgtcttatttcagtcacttcttccacaaacatgttgcaaatatattcttgcctgtaagcttttgcaaaaggaattttaggtcttttttgcctatatgatttctatattctcaatcataatgtaggttttttaacatcaacactgtgatttttcatatgagaatctgaaaatgtagaagtaggtagggttgaaaaccttaagactcacatggtgcaactccctaactcttagatccattttagagacaagwcatggacatcctggtggactaagtggtttcctcctatctcctgctacaaaaggctccttatattaagatattacatttgtataatgcatagaattcaggctaacagcctgcagacatgttgttttaatttattatagccatatatatatataaagctagcaattaaaagtcaaagatttcacatactactctggaaaagaaacattgaaagagcttgcagttttagggtagcattctcaagtagtaacagtgggctggagctaaatggtacatacccattttgacagaattacatgctccacattacctgtctagatattgtagacagttaattgtaccttgcctctctcttatatgtatgttttttacttgaactgtagtttaatactacgcaatacccagaattggcatatacatacccatatattaaagaggtatacacatgaagttatctgaggttcttaacatgtgaagcagtgcacagcattttagtggtttggagtagtttagagtgatttggagtaataagcctctctgcttgaaatctccagtttaccacttacaagctgtgcaacattaggcaagtcatttaatttttctgaaacatgatttctttctctgcaaaatggacaatgtaacattgttgggaagctcaaggaagaaaatgaatggaatagaaacttttagccaagggcttaataaaattagctatctttattttgtacagactgggtaccagaactcatatctcctggaccgaaaatgaaactgtttctattgtgcaattctgccacacatctatgtttcatgtgtgtccttggccacagtttctggagcttcataaatgaagtccctgctggggataccagctggttctagatgagcagtggaaayatctcaacatcctgcctcaacctgccctgtccccaaagcttcttatgtggtgaacaggaaaaaggctctgtgtgacatgacacttcaataatatacaaaggttgggttgtgagtaggatcagatgcttttatgtctatttaaaaacaattggtaagtaatacaaaattgagagaatcaaattacaagatttgttaggtaaatgagtagcctgggactctacctcgtggcctttgcaaatcctaagagtcttatacaacatattggctttgtgtatggcttccctctgttgaatctggaaaattaacttatgagagaaacttgggctactccgcatctccaggccagagacagtcttcaaacttcacattctcagtagcaatctcttctctttcctgtcctaccattttttaaatgcttagaatgttgggggcagtgtggctgtgtggagagcaggaatgttcttgttttttaagatagcatttactcatgcctcagaaacaccccgaaagaatcaatacttcctcataaacattttccagagtttggtcttgcctcatctggtgcagaatcattgttcttaattgtataaaagaaaagtgaaatttctttttttttttttttttttttgagacggagtctcgctctgtcgcccaggtcggactgcggactgcagtggcgcaatctcggctcactgcaagctccgcttcccgggttcacgccattctcctgcctcagcctcccgagtagctgggactacaggcgcccgccaccgcgcccggctaattttttgtatttttagtagagacggggtttcaccttgttagccaggatggtctcgatctcctgacctcatgatccacccgcctcggcctcccaaagtgctgggattacaggcgtgagccamcgcgcccggccaaaagaaaagtgaaatttctaaacttatccaagaccttttaaattatatcctcaggagtggatcccaggaaagtgtctttctctcctttttyccttcaaaccctctagattattgaaatacactgaagtttgagaattaagtaatccatgttcagagaaatgtgatagcctctgaactaggcatagagatgaagagagaattggcatcactccagcaacaagtgttactgtaaatttagacatatgaggaatacaaagctgtaggtcaagctctttagaagtacgcaggtttccttggctctgaaaatgtaaaaaatgagaactatgtaagaaaataagaacttccatgattaaatatgagaatgaattttgctaataataattgctgtagggttttgggaatgggccaaggaagcataatgggaacaatttggaaaggaagtgatacgatttaaagtaggtcttaaaatatgttcaatctttacatggatggataaaagagaagggggatttttatggtggcaggagggaactacatgaatagatgtgaggtgttagtaaatacaggggtttaggttaatgaaggattgagagggtgtattgaagatagaggtatatacaaagtcatgtaggtgcttatgaaagtagtcaggacaagggttgagatcctaaacttcaaagtagatcgttatgctttagtgaaaaggcgatctcttgatccagcacagtgaacatacaagcctttccataacagtgaaatttgaccaggcatttgagcaacagagtcccttctccccacataagactttgatctggaaatgtgtggacaggcttcactttgggcaaacaaaaatgaaaaccatatccaaggcagaataaagcatttgtaaagcaargcaaccctattcaaasagcagggggaagtgaaaagagggaaaataagtggaaagccagagatttacctttctctgcttgttgctttagctatgtctcaaggggctgctcccccactctgcaaaaccagacggtacctctctggtaatctgtgtgtgcagcaggatcaacctacaaagcatagctttataaaatayagttgctgaaatgggaactggcagcctcattcattttaaataagactaaaacataaaatcacwttctttttcaaggtttcagattgcatttmatatttcttatgctaaatcccagatcacttgaaaaccccayagaagattaaactcatgttctttttcttatactcttacaatactggcaaaataaagtttttgcccttcctttttttttttttaatcctttaaccaggtcagtgtcattcattcacactgctctgagactgtgctaggtggcacagagagtctctaaggcacgatgtggacaagatttagtgctgaggaatttggttgagatcctagctaaatatagctcagtggcaaggaaggtcttcattttatgagaggacttcagtgggcataaaagaccaacctattgtagcaaggctgaaaawccccataatctgggaaaggtattaccagccttattccatgtgttggtctaaaaatcagtgtgattcctattttacacactggtttaacctagcatatttgcatacttgctcagtttagtgaatgtctgttatcattttagtcatgcaacttggaatcccccttccttaataaaaaataccctcatttccctctgaggagctagaacttccctaatctcacaatgtgtgctttgggtggagatgagtctacctccagctccaaaggaggcatctgatttagccctgaacctcttttttgaccacaaagttggatgcataggtagatagaggaataaattggagccaataaaactaatcttaggatatggttgaaacgaccaaaaaaaggaggtctttttttctttgccttctataatttccacagccatcttttcatcacaatgggacagcctgtctgagaatgaggccartgcaaagaagaaagtggagcccacgtacagagagatgatacattgatgatatcatgtgtcctagattcatgcttcatatgaaggtaaattttacctttgatgttttgtgtgttcattaaaaaatayaacattatatcaagatactgaggtagcattcaatggtaaatgtcagtggtatgctgactgccaaatatttgccaactggatggggtgtgtgtgtgtgtgtgtgtgtgtgtgtgtgtgtgkcaagagggagatgagggtaaagctctgatttacagtgttttctaatctccataaacattctcctatgccaactttgagctaccagcttgaggtcactgaacatagtcctgggaagagatgtatactgtagattcttgcaagctgatgagagctagctccaaggtatcactggttagattatatgctagctttcagtaagtctaaaaaatttttctcctagtatttatcagtcattttggaaacattacacctttttcaaaaatcygtaaaatattgctatgagacatagtgatgcctggaacacttcctttccagtttgtcagcagaggatgaagaatagcatcatctcccattaacacaagggtagggataggtttagaatacttcagatacatcatacaactctgacttagtaatgggaggtaagaggtgatcagaacagaagcacacatatcagaaagacttcatacctgtgtggcaatatttagatttatctttcatatggaaacctgggaaagccagtgaagttttctgagtctccctttgcacatctttaaaattggttggttactaatacctaagttacggagttgataagagaactaaatctgataagctatgtgaaagggcttagcataatgtggagaacatggtgagtgtccagtaaatattagtgataatgatcataactattaatataaataaataatccactacttttttctctcctctccttctaggagtcccattataccgatactgaaacactgaagtcttgttcgtgtcttttttatgtttttcagattgggtaatttctattgatctgttttcattatcattgactctgattttcttttgctctccaattggctgtaaagaccattggtccatttttcaatttatatgttttaatttgagatcctagaattttcatttgtttctttacaaataattaatctgttgattttcactttgaaatcactctttttctgttaatttaacacgtgatatattgacattttttaaattgattgctctttctctgaatcttgcttaacattgcctcatttcattatgcttttggtaaattttgattgtctactagacattttgaatgtatgatgcactgtggactctggcttcagttatcttcctctgaagtgcatttatttttattttaataagtacttaaattatcgactgatcacaatgaagttgtgcattctttggtttacaattttttttcttccttcagatttcccttaattctatggtcagtctttagtcctgggacctagcctctactcctaaagcttaccccgtctggggtttcagtggaaaacccaaggtgactaccacttgtctaatggtagtatccaagctccgaattcttttttttttttttaacctgtggtagagaacagctgaaatttccactcagctttttcagatatgtacttattgctctcttctacgttctttggatatatgtgaaattcagggtcagccacgatgtgagaggagttcacaggtaaattgtggagccaacccaatgtggctttccccttatcaggactagtctctcaatttccagatactttgtcagctgcagtctctgtcctctaacacagtggtccccaagctttctggcaccagggactggtgtcacggaagacaatttttccatggactggaggtggaggcggaggcagaggcggtgtgtgtgtgtgtgtgtgtgtgtgtgtgtgtgtgtggtttctggatgaaactgttccacttcagatcatcaggcattagattctcataaggagtgcgtaacctaggtccctcacattcacagttcacaacagggttcgcactcctctgagactccaatgctctgttaatctgcaggaggcagagcttaggcggtaatgctccttagctgctcacctcctgctgtgcgcccaggttcctcacaagccacagactggtactggtccatggcagctggggggctggcacccctgctctagcataccaaaccaaccagcctgcagctttttacctgagtttcagcaatcacataccacacaatgatgtgaagtaaccctaaaataaaatctgtaacatacccagtgccacttcctttcttcaaaggtcaaatggtcaaatggtctccagcttttgcctgatttttatcattctctagtgccttcaaacagtatttttaccatttttccagagttttaaagtttattaaagaggagtaaatgtaacacaagatactctcatgttattggaactgtaatcaacccattccttttccatttgtatcattttaggcggtttctatatttctcacctattgaaattcctcattcttgtattctagaaataatatgcttttaaaaatgttatttttagcattctggtgccttagagtaggtgagggtatagcttatgctgagttcttcacattgaatgaaactttccagaggtagttattaaatggctttcttggttaagcattcaccactaatttcattcaaatatattctggtaatgagtaaacatcagtttttcctactgctagaaataattctcccatgttttcattatgatctagggtccttttaacaagctcctagagaataggtttcttacaggtttaagtggaaaaataatttcacatggggtatttgtagggtccagaggtgactgacattatcatgcatttatgtattatttctcaggactcagagccaattgaacctgtacatagacaataacctgaaaggcaagatagatgcaggtttgggctacccagaaacaggtggcatctttggtagtgtcaagcctggcctccttttgtgcagactgaagtttggcttgtgtttttccatcagcctaagcttttccacttaccctcagtaaacctaggctctatcccagctgcttctaaatttgccaagtgtaaatgagctcaggctgctgaggaaaaaaaaaaaaaaaaaagcctgggacactaaggaaaatagcagaagaaactcttcaaaactctttaccccccagtgacttatgagacagcttctagaataagcaactacaatcttttcctccttctttgttatttaaaagaaaacatcaaaccaacactacttaaagtttaattattctgactaggagggaagttcttatctcagctgtgatcttaattgagaytgatttgaaatctagctaagagttctccttgacaggagatatcacagaggcagacaagtttaacgttacccagcgaacttggtgagatgcagaatccccttccaagtttcttaaggcatcactagcagaggaaaacggtaacgatttgtcgtttcgttttgtttaggatctatatatactctgttaccaaaagatggactaaactgtgtcatctggtccttttcaaatggaagtcctaattgacagtcttcagactatcaatcctgtgcatcagctattatttgagttatcatgctatcattccagagaacccacagtcagatgccagtgtaggtgtttcatattttctatgttcaaggaattataagatgttttggagagataaggaaataagtttagcatcacacacacttacctacataatctatggtgttattgagcatcttggttatacgtttcattttttgttgtttgctttgggatgtagctgattcagctgtaggtgcactcaagtgtgtgaatgcaggcatatgccatttaaattcatgaattacatgtccatacattgcaataagactttccatttattaattcattcatatttaataaacagtaaatgcaggtgttagtttcaagttcaggttccagtccatgctgaggtccaaagggagtgggtggatgaatgacacatagctggaagaacactcagggggccgtaggtaggtgaaatatggctttattcagccactctgatcagtagctctcttacactgtctgctctgtcttggctgctcccacacacgactgcgcggcctgctctttcttcagagtcagcagcttaactctttctctgggcacaagctggccaggctgtgtcctggccaacccccgccctccrttcatctgcaaagacagacagctctggctctctctctctctctttctctgggtgcgggcacacctgtacattgtcagcagagaaattataccttttacagacaatagcagcatagggccaagggatggcctccccatgttatggctacacagctgtgacaacaagtggagttatatgcctgcgctctaaacttgctgagtcaggtgggatggaaacatcctaccttggcctatccttgaccaaagcacagccatattccttacagcagggcacctggggtaacttgaagctagccaaaatttggttggaagagatagctggttatgatggtgggaaatgtggtgccaggcacctttccaatgaaacattttcctcctgatagtctcttactggggccaattttgccactacaatttacttctttggattgggtcatggctactttgaaataactttttttttaagtactgtgttcagtggaggagaggtgggagaagtttggaacaaggaggtgaccaactttatttttagacatgctgatttttagttgtctgtgggcatcgggatgaaggggtcaaggtggatacacttgtcagtattcagggaacagattgtggttagagaattatgtttagaagggtctgtatatccaagctaacagaaaccatgggtgtttatgtaattagctagggagaggtttaaaactaagatgagatgcttgttgctattctatgaagcagatattattattccaatttcaatagaagaaaattagtcccatggagtttacttaatttttatttaatcactaagtcgtgatgccaaaaatagaaccaagttctcttagtcaaaattatcatttgttgagtcatgatctctttcttgcccacaggtagctattggggcccagcatgcataaggtactatagagctaagaaaacaagcagaaggcacatgattggcccccaggcaagagtgggactgtacgagtttagaatgaatctctttgtcactatttacaccacttgtctcttttaggcctttcattgtattattggtcacttcttttcaagtcacggtctgtaggccctgctggaatctttttctgaagaggtctaatggtttacttttgtcaaagaggaaagaactgaacttttcaaccaaacattcaaggtcccctgagtctggactaactgtgctttccggttttatttcacgcttcctcccagaacggagtctttcctccagccagacagatcttgtcactattctcttgttttagtgatctatttctatgtaataatatgccccaaatttagtagcatgagcaataagcaacagtcatttttatgcttgcctctcacaactcttggagttgtctgaattaaactaggcattctttgcttgaatttctcatgcaattgaagacaggtggcagctggaaccgacgccatcttgaaggcttctttattcacaagtacggaccatgagctgagaagactcaaagatctgggggattaatctcctagatttcttcagtcatcttcttcttcatgtagtatctctgtgtggtctgcccagtgtggcagctttggtgtagctggtgggtcgggaccctggtggatcaggtttccaaagacacctaccccataaaagagagagctaggcagaaactaacatcttttgtgatttaaccttggaagacatgcagcatcatttttaccacattctatttgttataagcaagtcactaaggccagggccatattcaaggagaatgcaactaaacttcggctttcgattggagaagcgtaaagtcaattcgtggacatgttttaaaaacattatcccaccccaaaaatcttccgtgctttcaagattcttgcattgatagagatagataccatttcctagggctaacctatttctccactcatctaagtactatatatatatatatatatatatatatataaaattgtttttttttttgagatggagttttgctcttgttgcccaggctggagtgcaatggcgtgatctgggctcaccacaacctctgcctcctgggttcaagtgattcttttgcctcagcctcccgagtagctgggattacaggcatgcgccaccatgcccggctaattttgtatttttagtagagacagggtttctccatgttggttagattggtctcaaactcccgacctcaggcgatatgcctgcctcggcctcccaaagtgctgggattacaggtatgagccaccatgtccagtaagtactacatattttcatatcattgttaactgtcacttcctctggggagacttcacttaagttaataatcactaatgacgtctggaccactttctgcaatactctacactatatgcaatactagctatcatttttcatacacatgtctacctccccaactaggaagatatagtgaggttttaaaagataagaacgtgtttcaaaggttaattcactgattaattcaggatattaaggtgatatttattatgtcactattatttaataattgataaatgatagacatttcttcattacgtttctgaccaggtttatagtaaagctcaggtctgaggaccaggaagcttcacctctaatttagaaactcttgatagagcaaatccctttctctttga

SEQ ID NO: 6809 - DNA, 68114 bp, Homo sapiens
aataactaaagttacttaggagaattctcacattatattttgatgtatttggaatattagagttatctgcttggtacatagttggtgctaaataaattttcttgaatcaattattaaatacattaatgaaatggctgaacatttctaatattaacatacagagaagttgggttgatttctcttgaaaatattttttaatattttatctctaatgaagaattttctctttattttctctctggctttacatgccaactgtatatgtgtttcccccccacacacacaattttttttaaaattctccttaaaaaaaattttttttttgctcctcacactttgccaagtcccactcctaagtttttaaatttgtttatcattgacttataaaaattagtgagtgcctacaaggtgcaaaatgccaaacctaggccttgtagggggatgaaaatattaaggagacaatttagtagaggaggaaaatgcagaatggtgtgtaggctcagatactgtgtaggctcagatacagcagcaattcattctgccaagtgtgaggagaggagtggaggtgaaggtgggcactggtcagggggtgcggaggattggaggagttttccaagggcttaaagtagtgggtttgaaggattttcataggtgtgggataggacatattagtattcctgctcaaaataataacccaaacaaaggtacttggaatggtaaaaaagtctggtataacaggtaaatggaagagtttactagaagatgactatggcaatgaagtctgaaagaggaaggaccttgaatatcattccaaagagtctggaattgttctgtggttaatgagccatcatcagtggtttcaagatggagctggcatgatttgacttcgtttttagagactgactctgataccagtgtgaaggatggagtagaaaggcaaaagaatgaaattaaaaagatgagattggaagctataatactagccaaggcaagagatgatcatagtcataatcatagcaacagccaacacttattgaggaatgcctgactatgtggtagccagtattctaagccctcagcatgtctccacccattgaattcttagacaactttcatgaaattgatactactattatctctccacatgaggcaattgaggcgaagcgaggctaagtacttgttcaaggccatgcatctagttagtggcagagcccagttaaggaagtccagtttcagggcgtgtgctcttatccacaatgcacaaactcatgctgcagttacagaaagagaaaagagggcacaaccacgagtgatggaattggtaggacttggtatttgatgcgaaaggaagggataagtgatgactccaaaatttctagcctgaatggtggaagtttgcaatgccattagttgaaagttctagaggttgaggaataggttgagctgatgagttccataggtttaaagccaataaactcttcatttgggcatatttagcttaagtttggaaatcgggatatgtagttcaaggcttaatgatagaattctgatcttgaaatcatggtagctgatgagatggctcaacagagtagaagtaaacctggatgcttaataaggcaaaagaggtaactaaatatgcaaattagatggcactgagtgtggtacagcctgtggctgacctcagagtggatgtatatcctgcctaaatattccatttcatttattttattttattttccagagtcttgctctgtcacccaggctggagtgcagtggtgcaatcatagctcactatagccttgaattcctaggctcaggcaatactgctgcttcagcctcctgagtagctgggactacaggtttatgccccaaagcctggcttgttctctgttttgtttttgtttcctttttttttttttttttttttttgagatggagtctcgctctgtcgcccaggctggagtgcagtggcgtgatcttggctcactgcaagctctgcctcctgagtagctgggcctacaggcgcccgccaccgcgccaggctaattttttgtatttgttagtagaaacggggtttcaccatgttagccaggatggtctcgatctcctgacctcatgatccgcccgccttggactcccaaagtgctgggattacaggcgtgagccaccacgcctggcctttttttgtttgtttgtttgtttgttttgttttgttttgttttttagtagagaaaatgtctctctatgttgctcaggctggtcttgatctcctggagtcaagcaatcctcccacctcagcctcccaaagtattgggattacagacatgagccactgttccctgccccatttttaatgtatctgtttggccagagggtgggatggaagaagctgggaatagaaccctggtccacattttatattgaagctgtggacagaggaagatgaggcagtgaagaaaactgaggctgggccagagtaataagagaactgggagtcattctctccagaaacagcctaaagaaggaaggcagatgaaagtacaggctgacacagaagtgtgggtagggagagggctgagataggctctcatatatttgccagtcagcaggtgatccctgagagagctacttctttggaatgaagaaggttagggagggaatagaggtaagaaaattaagtcagaaagtgccaaaactattttaggaagtttgcagtggagaaaagagagtcagatgttaactgttgtgggacagcagagttggaggaaggttcttatttgaagacaggggagtcatgagggctgaataaaaggaaccataagggacacaagaagctaaaaagaggtgattgataatgtatggtctaataggagattggaggaatgggctcaaaaatcacagacagggaggggttacattttgttcctacatcaatgtcaggaaatgaatggagaaaatggaaacagacaaggggaaagtgtgagtctcaggataagaaagttgagattgagtttatgtagatgtccttggtcttccttgttaaggaagagggaaggtcatctgctgaccgcctggggaagggcctgagaaagtgggcacctgcagcacagtcccatgaagaatgggagagtgaatctggaacaaatccaaggtgggctccaggcctggcacaccttgcagaggttagatcagctggctttctagtggagcaagctcataaagtcacgtttccaccacacccacagtccttgaccacagatgcaaagaaggccgatgcctaagtttacccaatcttaggattaggtaacctggctggagtggacttgtggggaccagctcatgcagatgctggtttggagggatagggggtggagatggtgcactctggggccaccctggctgggaaggaaacccagacagactgggctggtttaaatctgccagtctagacatctaatcaggagaatccctcatccattcatcaaaaatgtccctgtaacttatgtttaaaggtcactttaaatgtccagcaaataatttgattctaaagatatagtgaaggcaagtccatggatgatatcttaattggaaaggtaaaagatcatttaaacttatcaatgaccacttgtggtgttgatctctgtttgctttcagaggtggccaaagacattttacagatatccacagtgtctcttttagaaacagacatagtggaagtgatggtgctttcctcgcttccagaagcagggagaagcaggttggagatgttcacactgcctacattactgccacaaggtaaggaaaacataagcagccagttctgctcctgagcccagatacattgttgttattgttttttgggtttgttttgtttttatcttggcatgtgaagaggtaaaatggccaccttttgtctatctttacaaagtaaaaccaacatgctaaacagtttgaagtgtggacttttcctctgggcttcctgactcatgagtctgctttattaccataggaaaagagataggatcaacggacacatcaaattgatttgttatttttgtgatgtctcttgttttgtagctttgaatagacaaggttaaattcagatagattacagtgtagttcccttcactgacaaaattataaagacagttttctggataaaaaggtatgagaaaatagatactctttccttgttttaatgacaaatatatcaggttagcagttttgcaaatatataattatagagcagaagagagccgacaacctccaagtacttttatgtttttataagaatctctatactaccatgggtttcttttaatatgtctctaagttaattgattaaaaattaatcaaggcattacagaaatattttacccactatcagtcatttaatactcaagtatttctagggagacaagtgtttttaaatcatttttatcacctactagcttccgcaatattagttgagcatttaaattttattttgcttttcataattgttcataattttaaaaaaacaaaattaatttatggtacaagtgatttctcttctttttccaaatctaatagtttccacaacctttgctgatgaaagaggaaggctgaaagatgaaatcattcataagtacctgtatgagttggagcacgctctgtcctctgcagtcttgggctttcaaagtaaccaaatatatggcttctgtagtcaagtgccatacatctgtagctaccttcttcctgaagaagtatgtcaacacttaagtgtgctctcatttatcttagcaatcaagattgatacattatactgattagatgtgatcctcttgaccactttaacagaatagttcagttaacaaatgccttcattttattaatataattcccttgagctagatatatagtgttatttgttaatccatcatacaatatatttgagcaacctgatacttgtgccacatacatcatctttgtcagataaacatgcagatgacacaatattagtttagtgccttaaaaaacaacctagcattaggaaatctattctacatatgccaagggctacaaggtagatgatttgatttgcagtggaactttgcatctaagccataaccaaaattacaaaaaataattaaactgtgtttctgacattttttcattacactctcttcagacttctcatgcattgtgtcacctcctgctgcacataatggcccagtaccctcctgcttgctgccccttgacctgtcactttcccttgatgtctgtctacccactttgataaggtctgccttccttcctctaaattcttcagtcaaagctcttctttgacagagtagccaggactagacacagagaaggaataaatgattagtggcaagagagattcaagaaaagtttcatgaaggaagcaatatttgatctggactttgaaaagtaagtcagatttagacatggagagatattgcatacaattttggtgggcagcgctcatatagggaggtagggcaggactggtggggatggagtagagtagggcattccagacaaaaggaaggacacgtgcagaggcttggaggtaggaatgcatgaaacatacggggaatattgactacattattttgacttaagcatgaagatatgtgaaaatgattagtaaaagcaaagattatcagtgtaggctaggatttttaatggcaagtaaataaagaagactttacttagttggcagaaacaaacttttatttgcaaaagtgggaaacatgatgcaaacgcaggtgtccactttatcctatatccatttatttacaatgacaatgtttgcactttatgccatatcagtttatttacaatgacaatatacaacaggcatgtatatctgcaaacccaaaggtgctgtttacctgatcttttctataatgtggttattttctttgattggcaggaacataccggtatctacattcttaaaccatacaaaaaagtacaaagcagacagtatggacctggactgctctatctgtcttcacatggattgtggctcataacaatagctaaatgtggaattctgtgtatccgagacgtttatactttggtaagctgctttcttaaaaaaaaatattgtgggtgtatatattgatctcatataggaaacattttatatgtatataaaaatttgcttatatatgcataaaaactctgaaaagatattgaaggtactaattaccttgcttgccattggaagtattaggtcatgggaacaggaaggagatttcacagaatactcttttataatttttgaattttgaaccatttgaatgtattgcctatttaaaaacctaaatgagaaaaggcatcatggttgagaaccagtatgactcagaaatctcagtttttaaattgttgccctatataccaaattgatgatgcattttgtttaagttctaatcaaactggcttagttagcatccttcagagcatgttatcttccattcttcacagtgcccgtcaccctctctcattatactcagctacttcacacataaatagaacctccctgactcttgaagccatcggaactcaccatctctgcttgctgaaggccccttccctagctttatagacttctgcaatccattcacttctctgtgtctgatttcctattataaattggtgataataatccctgtccttccatactacacaaaggtagtggaagaacaaattagtattggtgaatgtggtttgaactggggattttaaatactatgtattgccaattgcctacttccataccaattaaaatgctgttagcaaatagaaaatgatttatccacaaaaaaggggcatataaccccattagaaaagccgtgtggtagaattgcatttgtaatttttctggtttatttcttaactattgaggaaacatttgcttggtgtcggagtcattctcaccagggtcatgggattcagtcaatgagaatttcaatggatggacaaaacattctggtgaatgggagagatgatggcacccttgtctacctaaagtggaagtacgtacagtattcagtaagtaaccccatgtagtatagtgtgttaaaatagagattttattattatttaagtacagcaaggccaacgtgctgggagaccactgccagtgcaaagaaagtttgttatactcacagatcccaagagaagcgtacactgcattctcgggtaccacatggggcagacctggggtgggtcaggaggctgagagagggaggaaaacgtggatgagatcctctagtatggttttcacagggaggattgggcaggtttaggattggctagtttgaatattatcagtgggttctgaggcataggagctggctgtagttgtctcatacttggccctggggtgattagggtggggaaatggtggccccgattgtgaaagcccactagaggaggtggttgggggtatggtctctggattgatcggtttgcttttgaaaagcgtgttccagagcaaattgtttactatcttcagagactggctagcctccagaagtcagcaaggccccagatatcagagcatcaaaatacaaaaaaaaaaaaaagacatagttaatatttatctgagagtgatcagtcctatctctcataacataagaaatgtggacaattctgaccctcagataactttaaaaactcctgtttatccctgacatatacatgtatgtatatatacacacactttcctaattagattttgcttagattatatcaaagacagtttcagtccccaaacaaggaggggatccgttttagggaggtactattatcatccttgcttccaagttaaactataaacgaaattcctcccatggttaggaggaatgaacaagaacatccagcctgtgagactagaaacaagatggagtcagccatgctagacttctttcactgccgtaatctttgcaaaggtggtttcaatcatgcaattcattttagaaaaaataatatttcgtgatacctcctgtgatcaaagcagtaataaaatacggcccttctctgcaacattgtgaaaatgttaaatgttgtggagattttgtatcataacaattttgctagccacttacctcaaaaactcatttsaggattgcatcatcatgcccattttatacatgggattctgaatagaatattagcttttatctcactatgtaagtcctaacatattgtttataaccagcgaacaaatactatctcaggcaacaacaaacaagtgctggagccttatttatgcagctcaaaaagaaggacattttgatccattggtaatcacccaaacttctgactcaaaacaaagctgggtttaaaacgatggtctaggccaggcgcagtggctcacgcctgtaatcccagcactttgggaggctgaggcgggtggatcatgaggtcaggagatygagaccatcctggctaacaaggtgaaaccccgtctctactaaaaatacaaaaaattagccgggcgcggtggcgggcgcctgtagtcccagctactcgggaggctgaggcaggagaatggcgtgaacccgggaagcggagcttgcagtgagccgagattgcaccactgcagtccgcagtccggcctgggcgacagagcgagactccgtctcaaaaaaaaaaaaaaaacgatggtctaggacttttgactttgtgaccttggcaaatgacaacccctctaaatcatctgttacaatgttacttaaggtagggggtctgtagcatctgtgagcttgttagaaatgcatattcttggatcccatctggactttctgagtcagaatgtctgcaagtggggcccaggaatctgtttttaaaccctcccagtgatgctgatgcgtccaaagtttgcaatgccctggtgaattaagtggaagtaataataccactctcaatgcagggtggggtgatgagggggccacatgtgattatgtgtgtgaagtagcacactgcctggtgcattccgagagctcagccagtgcactggctcttctgtgcaatgaccagggcaggtacagagggcatgttgagtaagggtatgaggacagtgtgaggagagggtaccctagaaaggtcaagaagcttgtcatggcctggaacccatgaaagggtctcctgtaagaagcagagtcctttagccatgcatggtggtgtacccctgtagtcccagctactctagaggctgaggtgaaaggatcatttgagcccaggagttcgaggctgcagtaagctgtgattacatcactgtactccagcctaggtgacagagcaagaccctttctctttaaaaaataaaaattaaaaaaaaaagaagaaattctgcaaaagaagtaggcactgaagaagtttccacaaggcactgtgaagaattgtccacatatttccttggttagttacctataaactgaaatggttagttacctgaaaataatasagctaaatgtgattttttaaattatgatttttrtagcctctgtgttttcttttttattaatataggcgattyggaggacacctagccagtgaaattctggactattaccagaaactattaatttccctgagcagcgccatggacaaggagaatcattatttaagcacaacaccaaaagtttccgtagatttgggatccgattctgaacacacagttgagttcctatatgactagcttgcttgcttacatttctttctttgtaaatcagaagttttcggtttgtggttttctttaagcagatatttagtaatatttctctttatccaggtatcccatgattttcaaaaagggaataagctacgtctgagagaaaatattcagcctttctcaaagcaattgcaaatagtacatttcagatctcatttaaaccatagtacaagatccaggcttgcctggaaaaaaaaatcttctacccacacttgtgcttggtcaaaatggtctctctatactttcatattacagatattatttaggaagtgtctagctaaagaacagtattcactcattcaattaacaaatatttatagagtgcctacagagtgctaggctgtgggggatatagccatgaacaagaaagaaaaatttctgcttccatggagtttacatcctaattgggggttggagatgggcagggagaaacagataaacaagcaaatgcagaagaaacaatgagatagtaacaagttctattcagtgaataaaaataggttgatgtgatagtattgggctggatagcctctccaagcagacatttaagctgagatctgaattaaaagagaacaccaccatgcaaagacaatgggagggtagcaagagtattcagggcaaagggggaaagagcttggcrtgtggtatgttaggacctaaaaaagacctgtgcagttgaagcgagctagggagaaagtggtgggaggtgaggtcttcaaagtgggaggagaccaggtaacgaagrgctttgtaaactaggtaaagagtttgaattttattttacatgtaatgagaactgagtcaggtgttctgaacacaggattaacaargtatagttgacrttattgaaatgactatttgatgctatgaggagaatgtttcctgtaggtgataagaaggatmagaagcagggacattgctcaggaggctaaggcagaggttcaggtagcaatgatggaggtggaggagtcttgtgccaaggagagaagtggtggattccaggtgggtttcagaggtagggttgatagaactcactgatgaattggacatagagagagaggaaaagaaagggcccaagaactcctagattgttttacttgaacatttatgtagaagatggtgtcattcatggagatggggcagactctgggggaagggggcagctatgaagagaaagaagggaattcaaaatcagttttacccacattaagctcgagaagcctgttagacatccacgtgaagatgccagttcagccattggatagatgaaccttgggttctggggagaggtcaggactggatatgttgatttgagtcaagggcatgcggatgggatttaaagccataacactaggtaaggacatcatggaagcatgaatggcaagaagcagaagaggaccaggacagagcaacttctggagaggcaggagaagagttcagggatgcagaggaccctgaggaggggtagccagtgaggttacaggagaaccaggagaacatggcatcccaaactctttcaagacattttgctgcaaaggggagcatagaaacagggtggtgggccggcggggacggtggttggcacacacctgtaatcccagcactttgggaggccgaggtgggcatatcacgaggttaggagatcaagaccatcctggctaacatggtgaaaccctgtctctactaaaaatacaaaagattagccaggtgtggtggcacgcacctgtagtcccagctactcaggaggctgaggcaggagaatggcatgaacccaggaggcggaggttgcagtgagccaagatcataccactgcactccagcctgggtgacagagcaagactccgtctcaaaaaaaaaaaaaaaaaagaaatagggtggtgtctgaagaagaatgtgatggtcaagtgagagtagttttcctaagacaggagatagtagagcatgtttggatgctgttgggaaagatcctgtaaaagggagaaattgatgatacagaaggagatggcattgaaaaaaaattgtgttaagtattaagacttcaaaaagaagaaaaaagatcctaagcatagatggtgrcacaggccctgatgggcaggaacatttgggtcacagtaacaaagaaggcaaagagtggtgacagtgtgactggtctgatcatctctgcttcctcagtggaagctgtggctactataagggcagactggtgggacttacctgaataaaatgttacatcttgggcagacaaaatgttggagattattttcaaaaatgcaacaaatacaaaggaattcaaagcagttacatgtggtagggtgggaggggaaaaacttgatgaattttaactttaagacatgtctgtctttttctaccatgtatcagaaacagaaggcaagcactgacttatcacaagatgaattagttctaaccgatgttaagaaggaaattccttggatacaacaaaaaagccaagaggtatttgtgaaacatggggtaggtttgaaatagtgctctgtagatgcaccaaatagattagtttcctatggaaacctactggaaagttagaagatggaatgagacaccacttggcagagcattacaacatacaggtgtaacttttckgaaagcaaataaacaccctaaacacagcccaatcatttagatcaagttatatgagctttaagaactgtacgtaggctgacatgcaacccaacaatggtgtccaggtaagccacagcaaaggatgaactgcagtactccaccgtggagtgagttttaggggatgcttgtcttcctctgtcctgtggaccaggaacaggggaagggatgctgtggctgcagctattcaggaaggtgactgactgattacagctcgtgtctggatttagcctattgatctagtctcaagttcccgataaaagtgcatactggttttccttaatcaactgttcactaatttttcactgcttcattattttctttccattggccatataattgacatcagtttcatgttgctttaatgtcacttacatagtagcagttagatttaagcaaggtactgcagtggtattacttcatgtacactttatattagtctttacaaattttagtttctgtttctagagaattgctctctctctctctctctctctctctgtctgatatttctcttgctttgttaagtgatatacttgttctgtttcaggccatcaaaaaggaggttaatctgttttccaagaaaaggaaagagataaaacaaggaatcaaatcactttccaaaactgtaagtgttgtaatttcatattctaatacctttggccctcattctaaaattactttttgaacttaattttgttctaccctgaggaactatacctcccttttctctgcttgtaagctcagttttctgaggttctttaacaagataaaatttctccaattcacactccatatcaacagcggttttccccatcttcccccaaattaccatcttatttgtctttataatactgatttttatcaaagttatgcatttatatttttacagattaaataatactgagttgtgtagttaaaaataatattttttaagcagcaactgccctacttctcttgactgattcctgtactcctgaggtaactgttttctcttctttctactttttcatttgggctgtttacctctgtctaaatagtcttcttaatacygttgttatttcttgatatttctgttttgatgctaactatgggtgtcctggtatggaacatgagtagttatgcttgttactgctccccatccccactatagcacacatataaatcygtgcttggaatacacactatgatagttatttgaatattcttcaatgctgagccacatggtatattattattacatttctgcttttacaacttgatttttcttagaattaatagttgcctttgttttgggtaagcccttctatgacctattcaaactcaaaatgctaacaaattcttctcaatacaatcaaatacctgaagtgatcaatctgtgagtgcattttttgggcaacctcccttctagagctttccatcctccagctccagtcaaagcaccttgctcttgctctgtagaccaggtgtatggctgccgtcctagagatctgccttctaagtcagagctcctgtttcctgagtcccacgtgattttctttgttttcttggtgtgtattcttcagtagcttcctatgcaggactgctgtgttgtgccatgcttgggaacatcctttataaaatctgtgcttctggggtgccatccaagtggaatccactgtgaatgatgccctgctgctagacctgtcagatgctttggctctgttcttgagaaagggtacatgagaggtacattttgtgagatgtggtttttcttaaaatgtgattatcctacattcataaccatttgatggtttgccttcagaatgttgaaggctttctccattgtctcctggcttccagtgtttcctttagagaatccagtgcctgactcccaattctttgtaggtaaccagatttttatctttggagacttatagaatcctctctttatccatagtgtttggaaatttacagttatgcaccttgatatgttcgatgagtattctaggtttgctggtacaaaccaagactctcttcccttttccactcttctttgagccccaagaggctggcctttatggacagtagcaatgcactctcttgccttctggctttctcttgggtttaggcaataagtagcatcagcaggagaaccccattgttgctattcatgaaggccagcctcttggggctcagattgcagggcagaagactaagaccagggtcctcattctcccagtttcctccctgtagggttatgagttggcaatgaccgccatccttctcctacatttatgggtctctccaggttcattaaccactcccagcctttgcccttcagacctacgagcagagatggcttcccgagcccgcagttggtagcctaatgctttatcatgtgttgctggctctccttactctgccaaatcttttttttttaagtttctctcttcagttttcccatttgaatgtgttactttttcctaccaggaccctaggtgttttcttcttccatgtgctagacttcgatgggcattttaataggaaacctttgtctcttggttttagaaaaagttcttaaatcatttccttggcctttgtttttattttcctgattactaataaagctgagcaccttttcataactctaaacactatttgtatttcttctcttgtgaatttcctgtttatattctttgcctatttccttattggataattggtcattttcttgttgattataggagttctttatttttattttttatttatatgtatttatgataattagagttagctagcctatggtaacaaactcagaaaaacatagtggcacagtgatgagaaggttatttcattcccatgtaaccatcctgggtgggtatttagctcagcagctgctctgttccatgcagtcattcagagacccagactgttggagaccctgctatcttcaactcagggcttcgaagattgccttgcttgatctcatttgagtcagttggaaaggagaagagcgtggaagtgtgaatgcgacatatctaaaggtagcccttattattaggtggaacttcatgcaattgctgttttatgtggctcaacctacaaatattttctagaaaagtatatggctcatcctactmtaaatactttcttttaacttttataatgtgccaaattttaaataattttattataaagcagaattttaaaactatggcatgatccaagttattgatcattttctttataacttttgggttttacctctgattttaaatgacctttcaaagtcacacatattttcttctaatgctctttgatttcatctataatttatttttgtgaatggtatgacatatagttctaattttattttttcaaataaatagcccatttccccagtctgttttatttaatatactatcctttctctgctgatttgcaatgtctyctctatcaatccctggatataggattgttgctggactctgttctaagattgaatattgatttttcttgagccaataccaagctattttaattactatcactttataatagttcttgtaccttgagaataattctccttttgcccttctttaaaaaaaattggcctttttatgtgtacttaattttccattggaattttaaattcagcttgtcaatctccatgaaaaactctgatttgattttgattgagaatatattgcttatagtttgatttggagaagaatttatctgccagctctgaactttagtatatatataagtatgtrtgataaaactttactgaagaatattttttaaattgaattaagatatatacagacagtccccaactcacagtggttcaacttataatttttcaaccttatgatggtgcaaaagcaacgcacattcagtagaaacttgggcgtggtggcacatgtctgcaggcttattttgatcttttcccagagtagcaatatgcggtaccatactctctcacaatgttgggcagcagcagtaagccacagctcctagtcagccatgcaatcacgaaggtaaacaatgaatattctgaagtgtactgtgttgccagcattttttggatatcgtgttttatgttttcacagcccatcatgtctacaaatgccccttttgacatgatattttcatcttaccatgggtttgttgggccataaccccatcataagttgaggagcatctgtatatttatatatttacatctttcatttatttatttagagacaggatcttgcttagtaacccaggctagagtgcagtggcataagcgtagctcactgcaggcttgaactcctgggctcaagcawtcctctcacctcatccttccaagtagctaggcctgcagacatgcaccaccacgcccaagtaatttttgtatttttttgaagagacagggtctccctatgatgcccaggctggtcttgaattcctagccttctgccttggcctcccaaagtgctgggattacaggcatgagccactgcaccaggcctgtatatttatttcttttaaaatatataacttttaaagttatattttctttttggttttttttttttgtttgtttgtttgtttgtttgtttgttttagayggagtctcgctctcgctctgtcgcccaggctggagtgcattggcatgatctcggctcactgcaagctctgcctcccaggttcacgccattctcctgcctcagcctcccgagtagctgggactacaggtgcccgccacctcgcccagctgattttttgtatttttagtagagatggtgtttcacggtgttagccaggatggtctcaatctcctgacctcatgatgcgcccacctcggcctcccaaagtgctgggattacaggcgtgggccaccacgcccggccagttatattttcattaaatatataatacttacatatgtgtatattatatatttatttatctttattcaattttaaaaaggtaatctccagtgaaagtttatagtttctctgaaagtgactttaaatttcttattaggtttattttaggtatcttatagtttataccgtttttgtgaatggaatatttttctattgcattggtgatatggtttggctgtgtccccacccaaatctcatcttgaattgtagctcccataattcccatgtgttgtggaagggacctggtgggagataattgaatcatgggggcgggtctttcttatgctattcttgcagtagtgaataagtctcaggaaatcagatagttttaaaaaggggagtttccctgcacaagctctcttctcttgtctgctgccatgtgagacatgcctttcctttcactttctgccatgattgtgaggcttcaccaaccatgtggaactgtaagcccattaaatctctttcttttgtaaattgcccagtctcaggtatgtctttttcagctgcatgaaaacagactaatacaattggtatatgttatatattggtatatattattggtatatgtgaatgttactgatttttttctgaccaccttgttgaattctttttagttctactattttgtcacttgattgtcttagattatctaggtagactatcatatcttttgaaaataacatatttctctcatcagtctttatacttcatttatttttctagtcttatgattctttttatgaaatacaatattttgcatccctagttactgtaaaattatacccttctcactcaattaacttttcttttgggcaacaagtcttctatttgttgaatttattgtctctctccagtggtcttgttgttccccaaatatttagtgatttattgttattatttcatggttgtctttataattgaaactccctgttatagttccatgacaccaggtcagtctgctttggaagaagtgtaggagatctgactttagcaggtattctgtctgctctcagtaaaaagtgaaggggtgggtggtgttgggaagtgtcttggcatcccattgtgtggtgggggtkgttctctattctttctagccactaacagattccttgggccttgccctgtttctcccatccaaatattcattccagtttcttctacctggagacaaacactccagttactactgctggaccctagggaacttcaccaggtagggttacaggcaggttctactgtctgtttctgatgcagcacccccagctaatcaacctgccagcactcttaggtaaacccttgttcctgtatctggtgtagcttccactcgttgttgagtgctgtgctgagggcattcrgggctgtgatgcatcctgctgatccatctgatttccgtctttcagttgttatagttttcatgctcctgaaggattctattccttttttcctcttcattgtagtaatgggtttatctatgctatatacttcttttctcttaactttatattttggggcaaaaaagaaaaattgttaaactcattctcagtctaccattttgaaactgaagtcccatttttttctatcatttgtctgccttgtttttatttgtaagtgctttttatatattaaagacattaatattttgtcatatgtgttgtagtgtgtatcctttgctcctgaatttttttaagttatgaacttttaaagataatttttattgtatagaagttcaaatttatacaaaattggagagaataatataatacatccaatggccaatatcatttcaccaatgcttccatccattacccctcccctgattattttgaagtaaatcccaaacatcatatcatctttaattatttcagtatgtatctctaaatgataaagactcttaaaacacataaccacaatgctgttagtgtacctcaaactagcaacagtgctttaatatcattgaatgaaatgatgagcttatatatttttgtagttttccttattaaatgaaagagtttttaaggatgaaaccttaaaacttcaataaccacaataagcccataatctaattatttacttagtagtacattttgataaatagaacatctattttttattgattgctgcctaaaagaaactaagaaaattatcttattacagtttaattctttacttgtcagcactcttttttatttcaacattcagattctgaatatgatggaagaaaatgacaaactagaaaatattgcaaaattagaccaacaggaatttggtctggatcttgaggaactagaaaggcttcatgatgaaagtcaggaagaagtggcaaaggtatgaaaaagtataatttaagcaccataaagttatgatgaaagaagtaaaaagataataggaatgggaactttttcataataatgtgaatatracaaaacctttttcagtataatgtgaataaagcaaacatagtgcatataagtataatgaatcagaggatcatcgaatttgggggttaggagcagggagaacatctaggccagccagacatctgacatttgcttcccctccatgacattcgtgccagccatacgtttgaacattgttggaagtcttctcagccacctcatgccaactttggacgcttctggtttagtaagccctttcttaattagagttgaaatctttcttcctgtactcactgatccttctactctttgagcacttcctactctatggcccctctgagagtggtagaggattagaaatttccatgttccctgtggatcttctcctgtctgggctaattatcccagctcctatgaccatcatatattatagtttcaatagcctcgtcatcatcatgccgttttcctctggattaattatatttgcatatggtacccacagaagaattcaaattattttctgtccagtgtagagaaaagcataaactgaaacctccattcatactatacttctattaattcagcctttgtattattttctggcagtcacatcaaattgtttgctcatatggattttattttaaataaaagccctaagtgtgttttacacaggatattctgaagctacctctttctcaacctgctagtacaggttaattttttgaatgtgcaaatataaaaacacaggagaatgcaagatagctggattcaaggacagttaaggtggattataatagattaaacaactacaccaagaggaggttgattatttgactgatgcctctaggagggaggtttccaccatgtaccccaggacttggtcctgataaacatgtttattaatgactggggtgaagatatagaaatgaggagatttgtcaaattagtgaatgacatgagactgagaaggtgaggaaatgtagtggataacaattaggacaagagtatctcaacagactgacttagtacaataaaatttacctgagataatcattccttcattcattctgcaacatttattaatgtgctgggcatattaatctaggtgctgggaatagaataaagaagacagacacatttctgctgtcatggggctaatgtattgaagaagacaggccgtaaacaaatctctacatagtatatgatggaaacaaactggatgctgtgatagatgtgggagatctacttytgtggtcaaagaaaaccacttcaagggctgacatttcagttgagaactaaagggagagagagatctggctgtgcaaagatctgagggaagagaatgtcaagcacagggagcagcaagagcaaaggcccacaggcagaaatggcttggagtattccaggaacagcacaccagaaaggctgaagcatcgtggatgggagagagcctaatggaatgaggttggggaggtaggcagaggctagccctgacgrgcttgtatattgcggtaaagaatttggcttttttattaactgtgcaacaggaagctatgaaaaaaaatcccattttcttatcacaagaggtaggcaccaatctaggagctttttaaatgttatttattttgatcatcacaatcaaaagaggcaggtgatagtttgccgcacttgaaaaaactgaggcttagatagaggcttagagaattagagtcacttggctaagatcagagccaggaagatcctgactcttcctccttggctctggtttggctcaggctcggaatgccccctgctattctgcaccaagttctcccagcccactcatcttgaccactcagcaatgtgtgtgggttcagtgcctgcccgcttcctcactgtatctttgcttctctctccaagctgtatacaactacttgacacagtgaacctgctcccctggcccactgaactatttaccattgccaaactcatcctacctaccccaccgccaccctgtgcctctgccccagatgcccctccttgccacttaccaaattcatgctcatccctcaagagttctccttgatcctctgaggcaggatttggtgcagagaaaggccttccatatgctagtttccctcatattgtttwtttttttttcttgagctctgtgcctttgaagagatagtaacaccagattaggtacaacagtggcccaggagagaacagtgttagcagatggcaccataaactcagctgtttaggagctttcagcatgtttaggatcagaatactagtccttgggaggagttagtggcacctgccagtcaaggatgtgaatgagagactaggctactaccctaccccggccaggatcccaatgataggaagaagaccaaagcccgataatgacaatctggacacattattagggactgagtttggaggagttgatcaaacagcctcagcagtggagagaggagggccgagtgggctaggaatcaggcaggctctgacaactgatatgccaagccagctgtctatttagaaagaaataatttaaaactatattagctattaactcactggatcagaatyaaaaagaaatgaattgcaaattaaagtcatttaatcagacaataaaataaatagaaattcacaagaagtactaaaaaagacattttaaatctgcgagatattagtcttatctagtttgctaataattctgccaacaaaatgaagtgcacaaaggtcctgaagaggatcctaaggactaaagattgttagatctcactttcacaccaggcctttcagaaaactctattaaaataagaatacttaattatttaaataataagcaataggattatgtaagcaagtaaaactaattgaagtaacatgtttttaagtggaaaaaaacacagattgtatgatccccaagagtagtagagggttctttttattgtggatgtaaataatagaagaattaagtacagtaaagactcccagacagaggtcacaaactggcacttcaaatgtgtgttggcgagatttcamccaacatttagatatctggcagtttcacttaaaaatatgaattccagacctctctaataaaacaggaagacttcgctcagtggttttgcttccctgctgttccaaccagcaggctttgtgcacattagctacgcagctcaccaccacagtgcatccatcctcacaccccacttcactcgtgtrtgcaacccgaccatccttagaggtactgtgtgtcctcaaggaagagaatccaagcctacagacaaacttcaggagacgttctcaaaggcagagatgtgtttcccgaaagtgcatctcagtgcaaggkggctcaaagtgttggagaaagacaaactctaccactgaaggtgcagttaatggctacttagtgagtttacaatggagattattatttctgagtccacactttcatttttatcttttccctttgtctgtgttcttcaagatgataaaggatgtagagatgcataacttagccaagagctatttggctgaacttatcaaagaagaatgttggaattcgatggctgtgaaaggtcgagctcttaaggtaacagatagaaccctaggtacaaaacctgaygagaattgtcaycaaaagctcaggaaagttttaaaaataaatttaagaaaattcaggcatagcaaagcactgagagcatggcttgccccttcctatactgaatttcacctggatgtgtccctgtctcttggttccttccctctgtgctcagtccccgtgtgcttcccagccagcatttctgaagatctgtcttagcattcttttcctcctttcctctcaggcacccactgcatctgggtcttaatagctgtctrctcactcacatttcacacagattgaaaggtagacgaaatctggttcatgtttctgcctgtgcctgccttcccattttctaaggagctgtttctcattgagattccctccaatgtaatttccctctttgtgtagggtgaccaaaagtctcaggtcttgtctgcaatcccagagtaactattatcagcatccttttcactttcaaatatgctcccaatgtggacaatgaagtatacggccaccctacattttatgtgatggatattgctctaaaacagggtcctcatgagccatacattttgggctggatcatttcttgttgtgggggctgttctatgccctgtagggtgtgtagcaacatctctggcctctatttggagacagtagcattgttcgcctccagtaattacaataaaaaaaagttgccaaatgtcttgggggcaaaggatagggagagaagggaggagaaaaattgctcctagttgagaactactgacctaaaaatcagcccttcacaaaagcacagtattttatataaagtttataccaatactcatggaatacattgttttatttttaaaaaggtttccattgtcaattttactaacacatgataacctatgggttaattttaatcacagaaaacatcccctactcaaccccagatacacacaattatactacaaatggatttattttgtcttgcgtttttttccccaagtgttttcatatcccctgtgtggttgaaaacttcccratgaaagcgcgcacggttgaagagctgaaagaattggaaagagttttacagcaaaagaagattgaagcagagtgtcttaaagtactattttaaatatacatgtgtttatataagtgatgtgctttattttagagtctcctttgttcaggtttgagttgggatgtaatttaagtttaggtattgtatgtatttatatttttatttcttgttaatttgtagaatatattctaataactataggagcctatatccacacaataaatcaaggagcctgtatcctatacaacactggctagccctcaaatatgaggatataccttaaaaagtgagatttggtgttctgctcttaycctgcrcagaggttgtcttcatccacacatatccttttcatcctcccttgtcactagggattgtattttaagataattgatcaaggatgaagtagaatttgttttgatgsaattatggttttcctaaatcccaactttttaagcaataatctctgtcaaaccactaaaaaaacactgcccttcagtgtagttttgttttggtcrgaactttgcacccactctttttctgaaacaaaaagaaggcatgcttaattcgtgttaaccttcacccactgatcctttgttaacaggtttctttgtaaaatataaagagaatatatatttcttaatacttaagtaccaaaaaagactcaaaatatttacaagcagatgtcatactgacagaaagatataaatattacacaccatccaggacaatttttattcctttgatttatctatcatttatcagtttctgaagccttaatctcttctgcagcagttctgggatctattcatcacttcsaattcagttgttggcaagacaattcaacaaattaaaatgattgttgaaataattaagttgtcacaaaatttccctttagaggattcttattattgcataacttctgtgtcatctttttctacatgtagctacggaaggaaattgtagaggctcagtctggagttaagttgattaaacagcgtcatgaagaggatgatgaagaagaggaagaggaagacaagacagtaaaatatagcaatttgcccaattacctgcttggtagtctgagtactgattttggggtagatacctctttattgtcaagccaattggagcttcattccagagaagagaaaatcaaccaaattatattattgaaagtgggtcaattttctttttatcctgaaaaatctctagactccccattaggtggctttcaaggcctcacattgaaaacaaatgccaatcaaatgatgatttaaaaatacatagaggaggctgggcacagtggctcacacctgtaatcccagtactttgggaggacgaggcagtcagatcgtgaggtcaagagatcgagaccatcctagctaacatggtgaaaccccatctctactaaaaattaaaaaattagctgagcatggtggtgcgtgcctgtaatcccagctactcgggaggctgaggcaggaaaatcgcttgaactggggaggtggaggttgcagtgagccgagatcatgccagtgagctggatctgcactccagcctggcaacagagcgagacactgtctcaaaataaataaataaataacaatacatagaggaatatacagatactgtccatgtcctttagacagatcttgtgtacaagagttgcgttcgaccatttggactaggttactgtgataccaagttttctaaagaacattccacaacagctgacaccacaaaccattctgttttggacttcagtaagctcaaagagaaaagaaaacactagaattccgttttctcggtatacccaaatgtcaattaggatttccctgtaagatcaagatgttattgtttatctatctgcttaacctggggaaagacaatttcctctaaatttctgtaaattctggggttcgaggacaaggtgttggggtccctctggctctaagctcctactccttaactttccaccaaacagtcttagaatacgtctatacatgtagaaaccctgactgaaggtttttgaaaaggcagtgactgagattgtgccaatgaagatagtttgaaattgaatgctggcaatccctgttcctgaaaaccctccagccacgtctgcaatttgaattctagtctcctgccatgttcttagctctctcttcctatcctcttctttttatgctctagcccctgaaatttctgttcatttacactcagagctatttagttacctcatttgttgctcagcttctgccttcagggtctcaccttcttgctgcttttaattaaggtgttttcctacaaggaggtaatttcagcccaagagaaatttttgtgctagctgttcagatcatttttttcaccttgctttaatggtttcatcttcagtaggatagacatagactaaactcctatggcaacataaaggccactttggattgacccatcaccaggagtgggggcaatccagttggtcccactggcaccttaggaattggttactccagctggctagcacaggtttctttcctacctgagaatggtgtgttcatatagaagaagagtattgtgtgtggtggtgattctctggcagattctccaaatactttctacaaactatctcttcttttccacatctaccccaacccaggttccaaagaaaagacatgtgccaacttaaatcctgtatattgctttttaaatattttatagtggattttgtacaaaagtagagagaatagcccaatgagcctctaactacccatcacccacttcagcatttgtcaacctgcacatggagttacaatttacatttcaggaagtaggttatagtctaacaattatgtggtagccttaatcctacccatacctggatgccactgtagattattgagccaagaaatgacttaatattaagtagtattctagaaagattcattttaccttcttaaaagataatttgtggggccaggcgcggtggctcacgcctgtaatcccagcactttgggaggccgaggcaggtggatcacaaggtcaggagatcaagaccatcctggctaacatagtgaaaccccrtctctattaaaaatacaaaaaaattagccgggcgtggtagcgggcacctgtagtcccagctactcaggaggctgaggcaggagaatggcgtgaacccgggaggcggagcttgcggtgagcagagatcatgccactgcactccagcctggacaacaaagcgagactgcatctcaaaaaaaaaaaaaaaatttgtggaatgattttagagggaaagtataattgtgggatcatgttaccagtaaagatataatatgtgatgtgttttcrgtaacatgttaatatttcaggatatcatttacaaggtaaaaactgttttcaataatgagkttgacgctgcatataaacaaaaagagtttgaaattgcacgcgtgaaggaaagaaatgttcgaattcgagaaattattttagatctggaattggaagaagcagtctggcaaccagaatttgaagactgtgagaagccagagagaacgcttgttgtgcaagatgaggaggtactggctagctgtgttctcctttcccttctttctcaggagactttccccagctcctatttgttcaacttggttactctgtgggaagtgattgtactgggtagcactctcagttgcaggtaacagaaagacatgatgtagcctcagcaatgatgagaatttcttttacgaatcctgtggagtccagggaagatttggacactgagcccaggaagaagcagaaaccaaagactagagcctcatgggaggcccagaagccttctatcttcatctcttagttcacatcactctgcatttctacttcctctagcaatttctactttgtatctcctccacatgagaaagtagctggtctgaattagaatctcttagtcccaattcccagttcatttgggaaggggctccttggcccagctggggtccagtgcctgtacccagagtggttgggtcacattgcgggaacgaggccagtggagctccagtagtgatctaggtcattcaggcggtgtggatcccagagaaaggggctctccggacagctttctttaaaggttttggcacagaggcagttggaaataaatgcctaaagaaaacaattaaaatctgacaatatttcattttttaaaagtaaaaaaaaatgctaaagaatactcaaagaaagaccttttctcacataaaaccaacttgactcctggggacaaaagataatagtggtgtttagaagtaatagaaaatattttaacagtctctgctggatattggctgggcaccattcgtggtgccctagatggattgaaatgaatttatcattgtaagtcatcataaggtaggtactgatattagttccattttacagatgaggaaagtgagacacagagagtttgagtagtttgaccacagttacaaagctagtaagtgtcattgttggggctttggacccaaaccatcatgccttagagttcatcctcttaacctgtgcactctgctgtacttgtttaagcaagtcatttttcctaaaccagactttcactatgtgacctaaaactctggagcaaggtgacagcaaggacctcactctgctgctctctggagggccctgcttggggcagtcactttgtacctacttctccttgggctctagtccatcctacatttaggagagtgctcttgctgcaagccaaacttactatgtcccttctctgcctcaccccttgcagtggctgctcacttcacttgggataaagcccacgagcctcctcctaaatgcccaccccaccccctttcttgcccaacttctctcccacctggctccattctggtcacaatttcattcacacagtcccttgaatgccccaagctctcgacctcttaggacccccatccttcagaatttggcttagatggcacttctttgagcccccctccctcccctccttaatctatcaggttccctgttataatctttttagtggtggacacaagctttgagagttaatagagaagtaaagatctatttttccaactctctcattttagacctcatcttattccaaaacagaaaattgggtgcaaagtctgcagagtccctttaatccccttagtatcttccagcctcctcccagtatgtggaaggaaagtttagtttgaattttgtaagaataatagcaggaaatgacattttctctttcagattacagcccacaaacacattaagccgtggcacaaagccaaagaattgatcgtgaatcatgaaaaggagcactggcttctgatacaggcatgtagctttgcttaacacaggtcctaagaccctctttgctttagggatactgcttcctagtttggtttaataacccatcaacacatttgtcgtggtcagaggtcacttgaatctcagttggcctcctttccccttctctcctccaggcactacctaccttccccaatcccaaatgcagtcattctaatgttgggtgggaagctgcctctggagccacctggaatgtcaggtctctgtctcagtattcctctctgattctggctctttcccaggatgccagtacaagactccgagctctgatggacatgatgggaggagttctggaagtcaagaaggaagatattttgagaatggtgatatttctgttcatccttatagaaggtggaatggggtggaaagagctacttaagttttaccatttttgtcctatataaacctgggttttagaagttctacagcaacaactattatacaacctccgtagtaccttataaacctaccacattagggcctggcgtggtggcttatgcttgtaatcccagcacttgaggaggctaagtgaggaggccaggaattcaaggcaggaggctaggagttcaaggctacagtgagctgtgatcacaccactgcactccagcctgagagacagagcaagaccctgtctcagaaaaccaaaaacataccacgttagacagataataaatttgaaaatgcaggtttgccttccaatctgacaagacacaaacaaatcaataaaaataagtaactacagtggttttggtctctattgaaggcaggaatactgtttcatcagtaattatccagatataccaggaaacattttctttgatacctgacataggttttcctggggctcaggggtagttctcactataaagataccaacacacccctctgagtctatcacctaagagtccaggtatatcccaccctgctcaccttcacctaagtcacagaagaactgtygtaaaattttaaaatatcttttgcccaagatgtcaggtcgttttccttgccaatgtgaaggactgtatccttttaaagggctttttaaaaaaaactctgagcttttactgtactactgcatttaacgtttgagctgaaatatatgcttttcttcatatcttcaggtgattcctcaacctgctttcatggcaaaacctgatgctgtgtggactgaagaagaaagaaaacaattcaaagattatgagaaaaaagtaaaggagttaaatgaagaaagagataagtatagaaaggtcagaagagcaaataattaatataacctaccatatccagagtgctgtttaaatatcttttcaaatgttttctactttgtcgatatctttaatagcttaaggacagtgtttcagcttaaattctcaagagaatwtggagaagtaagtggagataaatttaaggaattaaaccaattttaaagcaaagaaacatacagcaatagtttttttaaagctgttattgatttcagcatttcccgtgtcattacaattcatttggcccttcattcattcttcaggtgttcaatgaacccctaatacaacatgttcaagtcacggcaaggtattgctctgtgttgtgtacatttatttgaattcagtaatacttttgcttgatttgttctccatctcaggaaaaaggtttgaataacaaatggcataatcaatgcagtacattatttacaactcaaattcaaggtttttacagtgcagttctgctacttttatccccatscatcagaaggaaacactgtcacattaaaattgctcacaattacagtagagatataaaagacggtgatgtgcagtcaagtaaataatatttattcttctaagaaggaagtaaagtcataccatcattcaaggtaggccagctttccagcttgctagtggctgtatctcatgaagagcttctttgaatctgttgtgaacctgtccacatttttattcactgtggccctgtagggtcccttgtattttaacctaaaatggttcttactcaaagccaaaatcagtaatactgaaagaagtaaagatttcaaagagttatggagtatagatgcctaaggaataaaggctgatgacctatcaactacatttactccacagttttgtgttgtaagatagtccactgcctgcaccctcatgtccctgcaccttctttgtactcacctgctgaaaccccagccttgattaaatctgatactctgccttctctgcacctgcacccatgaagtggctaaagaaaaactattgactgggtttactcaaaattatgaccttaatctcaactgggtccttagagctggtccgcaatgctactccatttttcccctagccaagtgctctcacacttgaatgcgaatctgcatcacctgggggatttgttaaaaatgcaggttctgatttcattgtttctctgtgaaaatggaaggacgctgagattttgcactccaaataggctattgctgkccagtggaccctactttaagtagcaggatcctagagtaccatttcacacccgttgcgcatctcccaaactttcaacacctgacgccctcaactcactctcaccttattttctattttactaagagaagagagacaactaaaagttatttcccttactcctctactgctgcatccacccgccagctccactgaatccatggcgtctgcctttctgcttcttatgggtgaaatggccttgcatccacctargcctggtcctctcctggtgcactagtcaccatcccatctcacctactcratgtcattactcatcagtttaccctcttctttcctgcatcatcaatttttcccaccctgtggattttccccatcagtgtagacacatgctataattgtatacatctctcatcttattaaaaaaatacttcctggaaggaaatgcttgagttctttctactgttcttgtgatatttgggtcagtataaatttatttcaaaacaaaaagtaaaaggaaaaaacccaactcctttggcctctctttccccctggatcactcaatgtctctgctctcctttactgcaaaactcaaaaaaatctatgttgatggttttcaatttctctctcaagtaaaaaaaaaatcttgtatcgtggaaaatgtcaaacatgtataaaaatagagagaacagtataatgacccctttatccagcttccgcaattatctactcacggccaatcttaattcattttatacctccacttacttccctaacattggattatttttttcaccaatttttattttagaattattcaaatgtacataaatgttacatgaatagtaccatctatataccatatatttgtaccaatggcatatatattacgtatatgttatatatatattgtatatgtatacctgtgcacatcagttttttatattgccacatttgytctctttttctcctgaatagttggagacaaatcacagatatcatgatattcctaaatattacagcttaaacctcctaagaacaaaaatattcttctacataaccacagtaaaattatcatacaaaagaagcttaatattaatatgattatctaattaagtctatattcagattaccctgttgtccaagtagtgtccttcataactttttttattggtgtttatcaaaaaatctaatcaatttcacttagtttgtaatgttcttttagtctcctttaatccacaacagttctacaactttgtgttccatgacattgacattttttaaaaatcgaggcttatttttttgtggcatgtcccccaagttgaatttgattggtttctcatgattagatttaggtgcagtatttctgacaatcatactaagtagatgatgctgtgtcttcagtgcatcgtatcaggaggttccagatttcagtcagtcccactgttggtaacattaagtatgatcactggaaagaaggtttctccagatttctttgttatagaagttctctttctccttcgtgtgtaataactaacctgtgggggtgacattttgaatctgactctctgttcattctgtcttttggcatccattgatgatccttgcctgaatcaattattactgtagtgattgcaaaacggtgcctttctagcttttatcatttatatttattagttagtattcttctgcaaagaagagcttttcctctgccctaccagaggcatactctaacttaatgtgttttaatccatgactatcattattatttctgttgttcaaagtgttcggagcttcttcaagttgtcatctgtgtccttttcatgtgtcctcatcagtttttgagcactttctccgtttctaacacagcaagatgttttaggcaccaagaataagctatttttctttttagagaatcctggattccttttgctggcaattggtatttagagaccaagatctggataccagatgtgttctttgctataggggttaggagtcattctctctctctctctctctctctctmwcwcacacacacacacacacacacacacacacacacacatccagttagctccaattccaactcaattccaattcgacagcacagggttcttttctctttccttcatttaatatttaggtctccctttttcagtgaaaactctagttcccaaaatacacatatacttactgatttgctcagtcctacaatgtacataaaatacctctatcaaaaatgctgtcccatctaccccctatgtttttttcaccaaactatctctgcctcttcccagagattccagctgggctagacgctgagcccctttggtaacaacatttaagggaacatgagcacaacgcataatgtccttaaaagcatgttgtgatgtgcacattttgtaattaccttttttgttgttttatagcaaccatatgtaaaacattccaaatacttctacagctctgcagtctaatccctttgtcacttttggaaggtgacttttcagcttaatgcacattgccctytctgtagaggaaggaaaaaggtatgggcctgccttactgagaactaaacagagtccagggaaagactcccctgtgggaaaccactttgttctctacaaagtatcagctaaaccagaaaggtgattccaggaggggttagccaaacagcagcaacaacaaaaatgtgcagttcaggttttcagctttaagatatctttagacaatgttatttttacttgttttatttttttcattagaagtgaccaaaattaagatggtgagacctctgagaccaaatttttgtcccatccctatccccttgccagttgcttacagaatggatcatgtgccccttatgttgaggggaccacttaattgctctcctgcgtccttgaaagaaagaagtaagattgtgtttttgccaccratttagccatataaaccccatctccttgccgttttctgggtttcgagctgctgtctctaaaagtaccatatcattgtgcttggtatcagttggtgctggacaaattttgaacaagttatgtacaaaaccttttaaattttatattattttggaactttgcttctttgggtttgtggcatccgagccaccctgtttgactgtgagagctctctagtctgtgggctggcagtttgctgatcgtttaaagattctttcccactcaatccccactttttggtaaggtttttgtgtaaggtctgttaggtttacatcctgaagcttattggcttaaaatgtactcttctttgatgtagtctctttggggycaattgggagaaagagaaaccaatagtgcaaccattgtgatactgaatattaacaggtatctttttggaaataaagaaacagtccctccaaacaaacaaaacaaatactatagctattttcrgatttcctagtagctttttttttgttcttagactatatcccgctaagaatacaccaacatattatgtttagaattactttgactaattctttttttcccctttctgtgaggataacattaccagtttgatatacagttgacttctttaagcaatggggaagaggctggtgtgtcttccgattttatgatttttcttttgtttctatatgaccccctaatttccacctcttccttctttccctttactcccaagtctccacagggcactttcctctttcgagttgcccttttctccccaaagcagtaccctgagaccacacctctgcccttttaagtcccttcttttttatttcaaagtagctgcttttctgacacctctacagctaccactctaatgcaaactactgtctgtcacctttcccaggmtttattgccttagttcctctgccccctgcctcctcccccaatccctatatcccatctcatttcatctcctgtcattctttccctcattaactgttccagttccactgatttccttactgttcctcagatayccagcaaactcttgacttgaacacctgtaggtcattctcgctgcaggtccttgacacactgtatccttggcctggagcgctcttcccccttttagctacatgactcacattctcaccactttgagatctctactcaattgtcacctcatcttcctattatggtggagattcctgcttctcctcaatcctgccccatgtccctttttccctgccttgtggttctccatagtacttatcacckcctggctgagttcatttttacctgtgcctctcctcccctacccccttcaagatgaccattatgtggagtgaagacggttatatagtaactgtgcattcgcaagataattatttaactgcaatgtgataaattagaagggcaagttcagggtgccatctatgatggtgaacacagacattgacttagatcagccactggtacccaccagatcccctttgccagctgctgtgcccatcccctcactgctatgagtgctcctgatagaggcttttacacctgagaccttctctggaatgttgttgcccttggatgatcaagggagcctccatgtccagagacatcgccaagtttacaccactaccctcacccagggcagccagtgaccggctgatggagcccaaggkgaagggggtacaaaagcccagcctcctcaccccaagatgagacaattcagcagagtccctctcatttctcccaaccctgggaatcagggtttttcctctgcccttccccagccaaggctgggccacctgagatggcttcattgctcagctcctgccccttgcctgcactgcttccctcacccccttacaggtgtctcctaaagagcgccccctccagaaatcatgtgccctggaatcttgtttcaggccttgcttctgagacttaagacagggcccaaggaactcttccttgagaacatggcatttatgcttgcattggaaaagtgagaaagactgaagaggccgaagagtgggaaatgaagcataggcagatggaagagcatgtgagaaggacctgcagtgggaagaatttggggcatttgaagaagaaatggcaaagggccattttacactacaaaaagattctttcaggaccagagaccctcaaaaggcccagaatctcagtgtttttaaagaagggtggatctaagacatgtagacaatctggcctcagccagctgggtctgtggccatttgccatatgctgatgttttcattatctaggaacaggtgaacttgataaagggccaccagaaggacacaatctgtgggacttttccgtggctatgagatagcaatataaattattacaagcaaatgaccctgagatgtgtttttttcatatttgtttgttttattttcatatctcctcactgttaggtagcttaatttggatggtctttgtcctggcatcatatgcctctattatttttgctaaacctctttctccattatcctcccggaatcagtctctttccttattaatctggcatagagagaacttggcttttcaactttttaaactggtgtatatttaaactatttattaccatcatagtaataattaatttaaataagaattatcaatggatgctaaagctgttagataaaagtgtgatgagaaacaagatatttacatagtctcaaagtatctttccacaaattaataaattacaaatggaaaaactaactttacaatagagaaagtggcagacactacttaaccaagtgatccaagttaacatcaccaataatgaagcaaaccaacatcatgtatctcctgatggggtagtcacagaaggacataacataacttacatagtgttcctgctaaaaatgtgtaacctgggtgtacaattgagaaaacatcagacaaacctaaactgaatgacattctacaaaataagtggcctgtcctcaagtgtctgcaaattattctcaaatggttcagaaaagtgtaggaaagaaagtagataggtagggggcagrggggcagggggtgggagagagagagaagagagagagagagagagagaaaagtgataaagcaaatagggtagaatgtctacagttggtgactttgaaaaaggtatatggaaattctttgtactattcttgcaacttttctataagtttgaagttatatcaaaattaacagttgcaaacaaatttaaagataaaaatgatttatagcaatatacctcattttttacatgttttttactttgtatgttttaattttaatttttgtgggtacaaagtaggtgtgtatatttgtgggctacatgagatgttttgatacaggcatgcaatgtgaaataatcacaacatggagaatgggatattcatcctcacaagcatttatcctttgggttataaacaatacagttacactcttytagttattttttaatgtacagttaagtgattgttgactatagtcaccctgttgtgcaatgaaaattttacctcatattttgatgttgttctctttaaaaatataaatttatatttcacttatgtcctggtggaattttttaaaaagagaggacaagggaacattttccttttgatatagaactgtttggagagacaaaacatacagaaaacaagagagtacaaatatataaatatacatatatgtgcattcacttcttatttccttaaaatagaaataattccatgaaaatgaccagtgcttgagaaaaataaaaaattttttagggctaaatcatgtgtctggagattgctgtcctatataaagagtgaggattttctggaaagatttgctgcaatttgctttcctaggcctacttctgcctgtatcattagccatgatcagtaattttaagtttttttccccaatgtaatcttttctaagcaaaaatctcaacacacagtatattaaacagatccaagtgggagcatctctggtttaagagagtacagagcccagaacaccttgcaagggctgccctccatctgcccctcccttgtggtgaaatgtaaacatcacttcctaggagcctttaatactcttaaacgttaactttactattgttttccttttagtcattagaagcagaactgaagaaacttcaaaactctattcaagaaagcacacaggcctttgatgaacatttgaaaagactttttgaaaggagagtgaaggcagagatggttaccaaccaggtaaataaaagctttacttatgtgacttttaaggagcttgcagggcccttccatggttcttaggatgaagatcaacatccttaccaggtactaagatcttgtatgctctgggccctgcgtccctctccagtctcatcttgtgcaccttcccctttacctgccacacttcctctttgaacatcttgaacacacccaataccctccctcctcatgcctctgccaactctgccagtaatactgtctaccaacacttctttgcttcctgaactatattcatccttcagatcccagctcaaaaatcagttcctcacactaggtaatatctttctattatatactgtattttttcctttctaccattcattgctactraattgtaatttatgtgagattattttcaaygctttcaagactagatgctccatgagggtagagactaagtctgtcttgttcatccctgtatctccagcaaatagcaaagggctttgttcaaagtgtatgttgaatgaaaaagtaatcctcatgtcccaaaagatcaggtgaaaaaaaatctgtcttaattatcttcagcagtaggaataaaaatgaagtatgcagtaactaaaagcaagaagatcaaagagtgatgcccttaaattctgaggaaaaaattatttctagctttgaattctatacccagccaaactatccattgagtttaagaatagaataatgatctacttaaatgtaaatgtaaacccccaaactataaaaatcctgggagacaacctatgcaatatcattctggacataggaactggcaaagatttcatgatgaagataccaaaagcaaccacaacaaaagcaaaaatggacaaatgggatctaattaaactaaagagtttctgcacagcaaaagaaactatccacagagtaaacagacaacctacagaatgggagaaaatatttgcaaactctgcatctgacaaaggtccagcatctacaaggaacttaaatttacaagaaaaaaaacaaccccattaaaaagtggtcaaggacatgaacagacacttttctaaagaagacatacatgtggccaacaagcatatgaaaaaaagctcatcactgatcattagataaatgaaaatcaaaaccacaatgaaataccagataccatctcacactagtcagaatggctactactaaagagtaaaaaaattacagatactggtgaggctgtggagaaaagggaatgcttatacactgttggtgggaatataaattagctcaacmattgtggaaagcggtatggcaattcctcaaagagctaaaaacagaactaccattcaacccagcaatcccattactgggtatatacccaaaggaatataaattgttctattataaagacacatgcatgcatatgttcactgcagtactattcacaatagcaaagacatggaatcaacctaaatgcccatcaatgataaactggattgagaaaatgtgggacatatacaccatggaatactgtgcagccatcaaaaagaatgagatcatgtcctttgctagaacatgggtagagatggaggccataatccttattaaaccaacacaggaacagaaaaccaaatatgatatgctctcacttataagtgggagctaaatgatgagaacacatgggcacatagaggggaacaacagatactggggtgtctggtttcctgagggtggwgggtgggaggagggagaagatcagaaaaaataactattgggtactaggcttagtacctggtgacaaaataatctgtacaacaaacccccatgacacaagtttacctagataacaaacatgcatatgtacccctgaacctaaaataaaagttaaaaaaagagaataatgatattttgagaaatgccgggtctcccaaatttacatgcactcatttgatgagagcttttgaaagatgtctgaccaaagcagggggcttaatgagaaaagatggtgcaacactggagagatgtgaagggaatcttcaggaggatgactatatccccaggatcccaacaggaatggtacactgaaaaggttacatttaaattccctcagtgactttttacagaggtatgagcagggttaagggaaacagcaaggagtggcaaaygtgttgtaattagaaacaatgggaggccagtaccatctctagagctaaaaaggcagggaaagagagctgttcccagaaccagcaagacctgtagccttgggaaaggggctgctcttgggagttgtggccacagatagaagaatgtaatcactggcctggcagggagtggatgtatggatatactgggagtgagggggaagattgggaatgaatgctccagcctaacagcagcattagtcatagccaaaaggtggaaacaatctaaatattcaacagctgagagcagatgagtaaaatatggtgtatccatacaagggagtattatcccacaataaaaaggaatgtgctaatatatggtacaacatggatgaaccttgaaaacatgctaagtcaaagaagccagacaacaaaggccacatattgtatgattccatttttgtggaatcatatagtttctaaaacggcaaatttataaagccagaaattagaaagtcgttgcttttgtggggaggaggaggcctctaggaggtaacagaggggcagatgggaaatgacggctaaagaatttttggggaatgatgaaatgttctaaaattgattgtagtgattgttacacaactctgcaaatatactaaaatacactgaattttacactgtaaatggtgaattgtatggtatgtgaattatatctcaacaaagttgttatttttttaaaggtatgctgagatcctcatgtcatataagataatgaggaaactaacagactactcagtaatatcaaaataattcaggagctgacttaaaacatttcctttaaatgagacaatttaagattcaaagatgataatagttgtaawwaattaaacccgtcacatttgtttaaatttatgaatttatgatattttaaaaagagaagtgccaatcagtcactttcagaggatgaaaacaaattcattatctaaaaactgataaagggaaagcatcaagtattttgtctgcctttcctatatgaactgaagtgtaccactttgaaaccaaatagtagatgatgagaagcatctctttataaaagtatttcaattaataagtgaaaagggaaactaaaaccagattttcaccattttgcatctctcaacggattaatggacccgggcgttgagtatctgcagctgctgacatcacagaaagaaagacaatcagatgatatatgtctcctgatcaaagaacacaataccacctatagtcttgttaaaaggatcaaatttagatttaatcaggcttctggacccagctgccatttttcaagaaataaaaaggatgaagccttgataaactacaccatgaatatacaggcattaaaaccagactctgcaatgctacagagactgctgataactacaaataaattatgaggaaaagaaatgaaagggaacgtgaagagtataagagatttattttatttttaacctttaagttcagaggtacatgtataggtttgttacgtaggtaaactcatgtcacaggagtttgttgtacagattatttcatcatccaggtagtaaaaagagatttaaaagacatgaaaaaaaattatgaataagttatactgaagtggctaggtttctgtcttagtctgttttgtgttgctataaataatacctgaggctgcataatttataaagaaaagaggtttatctgactcataattctgctgtctagaaggttcaagattgggcatctgatgtgggcctcaggccgcttccatttatgccaggtgaaggggagctggggtgtgcagaaatcacatggtcagagaggaggcaagagagggtgcaggggagtgccatcctctctttaacaatcagcactcaggggaactaatagagtataaactcactcacccctgagggagggaattgatctattcatgagggacccatacccatgacccaaacacctcccatgaggccccacctacagcaccagggatcacgtttcaacatgcagtttggatggggcaaatatccaaactacagcattatacacccctgggtaataaaactacaaagaaacacaatatataataaaaagtcaagatagtgtttagtactggggttgagattttgatgaggactcctggaagaagcaactgcagtcrtaaagttctgtttcttgcgataagtggtgctaacaagagtgtttgcctttataataacccattaaattatatattcatgttatgtattttttgtatatgtgatttaccttacaatgaaattatgaaaaaggtaaaataactgaagttatttcaataagctgtattccctttttctttaaaatgtttctcttacattttaaagtttatgtgtatgtcataaacttgcttgattagtgccaagtctatagaaaatattgtctcaggtggaagtaattccaccaacctttttcttaaatatttctacaggaggaactgaaaataagtaaccttgcattttctttattgttggatgaagaattaagctctagagaaaaattcctgaacaactaccttacaaggaaacagcacgagaaagtaagaatagtgtctgaaatctgaatacaagcattttctgatagacatgcccctcatttagcaagagctcacgtgtctagacccttccttccttccttgcaccattcctacataaccatgtgcatcccttggctccctgtctggaactttgctccagggccaggtgaaagtaaccattccaatctgttaataaagttaggtgattctgcatctgcaatcatttagccaaaagaactgtgtagctttcatatgacatggtttataaaatgaggccatatagcttcatggttgaaagcactggctgtgggacctaggacaaggcatataaccttttaagctatttgcaagctcttacctagggaatgtttttctctctggacacgctaagatttactaagatgtaagcaatgggcttgcgtatagaatgaaaaactgccgtattatgaaaaactctaaatatgagcttggatagatatggttcattaaaaagacaatgaatacaaaatgtttatcacataatgtttctacaaatgtcagcttttgttagtagtattagtaaagagcatttatgaatgtgtgacttaaaaatgacatgaacttttttctaagagcctattaaacagcatatgcaaagcttcttctaaatacaactttacatatagcaaccctgcagcatactagatttctttcacagatgaggataccatctcagagagtctgggtarcatgcctaagtcagccactagtgtgtaatagagcagcagctggaactgtgggaataagtgaagaacatccaaatgcaaatgagcagatgctgtttattcagagcttggcacagcaagggactcatccaccatcagttacttttggcagactcaaaggcaggaaaggagtaggaaagctttatagtgcaaagaagagagggcttcagatgcaacatcattggaagttgttggcatgaggaagctagaggcaaaccaattagaagcgggacaactcattttactggtttagggaacatayttggctttctctggatggtcctaggttggaaatggggacaaaattatagaagctggtggtaatgatcaagccctgaaagtttgaggccaatccttaaaaaggctgtggtttagtttcccagctgatgattgtagaggttgtgggtcagaattctgttgttacatatggtctggcccttgtttgcatgtatatccagtctctcagaacccaggtccatgtgattccgaagcctgtgcactttcatcctccacactgacttaccaagaatgcagtgtgctccatagacactcacacactcatacacagagttggctgtacttagaaacaggtgattgggtgttctttcaaagtccccaattggtgtattttcttctataaatcttawcttcatgaataaatacttcacagacatatttctcttgtactaggaaattccttgctctttttagtatccccaatatttttgtttatgctggaaagtctccagtttcaatcaactattcctgatgctgttatagagccagacttcagaagctgttcggaaatctagagaagacctggatgtgtgcaaggagcactatgacaacttactggcagaagacaaagtgagagttgttgtcttacccactcaacaatgcagtagagttgttgctgcctggattggaggaaggttaaaggggatataatataattttctcacagatttttctcccacttaattctcagctatgggtgaacttcattctatgccattgtatatttttgaaaatccatgtgtaaaatgaatttttataagcttctctggtttaagctttctgttatacaaaatacagggaaatcatctagcctttaaggcttttcaaactttaggttgcagaccccattacttggccatgaaatcaatttagtaggttatgaccagcagttttataatggaaaagaataggatagaatagcataaagaagacagatggaacagaatggaatagaaaagaaaagaatagagtaacattcatgttttttgggtaaatatattttgggacacttctttgggaaacttctggatgatttctaagacctgttatatgaaataatatttttaatacacttagatgcttcttatcaaaacaaatctttgagacatcattgcacagagaatggttaatgtctaacaactttgtaaatcaaggtttcatgcatttttaaaaccaaagtgctaccacctgtattttgaagagtattgtcaacaaataaaaggtttccaaaccaagttgcagtcctcaaatgtcatgtttgtccttaggttatggatcgcagctttaaaaaggaattttctgaaattcctggtcatcaagtggatatactctacaaactttttaaacgccgaccaaggtttgtttctccttcactattgtgtttctgagaaaaaagtttgcaaataaagaggagtgttactagatttcarcttttttctcccaattaaatggaattattcagtgtaatatcttttaggtggagatgtttaagggttttgatcctaattcagtattttttgagattatgtctatatcttaaggtagagaataatgatttattttcattatttaaaaatagttaaggatctgtgtaagcacggtactattgtagattctgctttgtacattaaggaagttcctcttacatcatagatggcacacagatttaaaaacagttttttctaaagtgcgttcaaacaaacacaagttccctgatgtataaatcggaactacttgtaataggcttccaggactaactaagtttggggaaaatactgggttaaaaaaaggaagttaagcagcttttcttttactgcagaatgtattattggcctttggatctccaagtgtaagaaacagagtaagcagcgttttccaaacttatttgaccacaaattgcttttcctcagagtatctcatgtgcttgtgcctaaagtttgaaagatgccagtataaatggtagaaaataaccatttgaaaagagttctaagaaagtatcactgatttccaccattataaatgcagatttccagttttcaatcaaatgtaatctagaaatcaaggagtttgtcacaaagatgtagtcagctagtttgtgtttgagatacaaactctgacaggttataggcaacctagggaatttaacctagaacatgcctcttgttttggttttcctttttttttgagacggagtctctgtctgtcacccaggctgragtgcagtggcacgatctctgctcactgcaacctccgcctcccgggttcaagcgtttctcctgcctcagcctgccaagtagctgggactacaggcacatgccaccacgcccagctaatttttgtatttttagtagagacggagtttcaccatgttgagcaggatgatctcgatctcctgaccycgtgatccacccatctcaacctcccaaagtgttgggattataggtgtgagccayctcgcccggcggttttcctatttttaaaagagtgagtgataattagcccaattacataccttctccttgtggaaaaagaagtgagacctcccgcagcagtgggaaaagcacaagctttcttgtcaaacagaatcaactttaaatcctaacttcaacacctgtcagactgatagccttgggccatgagcttctctcccaggctgactttcctcatctagagaatggggatgataatatagtttcaacctcacagtgtactgtaaagcatcttgatagtgagtgcctcgcccaaatctttgtacccttcttccctttccagctgaagcacagggaaatgaaactaatctattaatgtagataaaaacagaattggccaggtggtggctcaccactgtactcccaacactttgggaggctgaggtgaaacgatgggttgatttatttgcctgcttacagtatacagaaaggaaatgtgtcctagcacagacacaattgtctgtcagtgctgacaatagttggagacatctgtagtctagccaaggtcacgtctgagaacctggagagtatggaagaagggcaaagtggatccctttatctgtggaataacccacctaccagccatcacatggcaaagggaagagccatacaatgtgttatgcctgtgctaagggcctaattgtttcacattgatgtttttatgagaatgtgaaatgttgatgggcttttcttggtaataccaggatttccaaacagaaaacgcactcagaaacaaccagcgttgtccctttcggagaactaccaggatctggcaagttgaataaggatgcctttgcccagttaatgaaagctatggatgagttggacaatattagtaacrtgccagaaggcttggaccctttggtctggaatcatttctgcatgacaagacgagcaaaagtggaaaatgaacagaaagtatatactattttaacttaatttaatttttagtgtactaatatcaaatacatagtttacattggtcagtgtaaccaaaaaagctaattatttaggtttccctgctagggtagtatttggtcatagtaataagataatgaaatactatattaaccctggtgctattgaaggctaagtgtaggcctgttgcttttagactggtgccgttcaaaatagtgtccattagccacaagtggttattatgcatttgaaataaatattgccagtcctaactgagatgtgctgtaagtggaaaacatacacattagaaggcttagtatgaacaaaaagaaatatgtctcattaatatttttatattgattataggttgaagtgataatattctggatacatttaattaaaatatattagtaaaattaagttcatttctttgatttcactttttataatgcggctactacagaatttaaaattacatatgtgactcacatttatggctcacgttatatttttcttggacagcactgttgtaggttatctcattttgcatagattagaattatatttggctcagcagaaccaactttatagttttgctagaatgtggcaacgagtaaaaatttaagagggtctttatttgggaagagaatccttcctcttgttgcttcttgaccactaccccaaattccctaaatttaatgcccacatgcatcaggctggcatatttttgttaaagtacctaggattctataatttcacttaaagtgatgagaacaaattttaaaaataagatataaaagaatttatagttgcctgmatacttgattttcaccaagaagcaaatttgatactttcaaatcgttcaaattgttacataccatgtaagttttagacatttaaatttaaatgttttattactttcttcgaaagatagacctgttaaggtttttaaatttaaaaagttaaaagatgtatgttgtctaaaattgaagctccatatgttctgacatgtttctggcttggtttctttaggtaaagcagaaagcagctgacttattggaaatggcaactttcctccagaagagagttgaggaggaagagaaggtgcaacaggagattgagagagtgttccatgaactcatcctgtaatttgaagctttctttcatgttcacctattcaaagtctaattagggctaaatcaggttgtgttatcactggggagaatgcctactgactgctttacagcyatctcccttccagcactgtgctttaaaatttctattttaaaaagcctgctttgttacatagaccttgattcaggatggaactttcccacgttttgttgctcttattacaaataagcaagtttcagaaaaatcttagtattgttttaagtcggccccttccacataaaaatacaaagaacctgtttttcagtactttggggctcaaggcatataagctaaccatgtggaaaattaagcagatgtctaagaactttccatgtagacacgcagccaactgatatatttttctttaggggaacttgttgtttactaagtgattaagatatttaagtccttgcttcattttttggctatatttatagcctcatcgataaatacttctctgatgttcccaaattcattgagaacacatcatttttagatctaggctatagcgaggatatgaattacccagaaatagatttgttaagtaacttacatattaaatattgttagtatagtatcagaaatcaataaataagttcagaattttaatagagttattttatttatttatttatttattttgaaatggagcctcactctgtcacacaagctggagtgcagtggcacgatctgggctcactgcagtctccacctcccaggttcaagagatctcatgcctcagcctcccaagcagctgggattacaggtgcctgtcaccacccctggctaatttttgtattgttagtagagatggggtttcgccatgttggccaggctagtctcgaactcctgacctcagatgatccacccacctcggcatcccaaaatgctgggattacaggcatgagccactgcgcctggccagatttgttatttaaaagtgtctctattttcttcatttttactttacttttattaccgtcaaaattatacaatcttttcttaatcctaaagtaaaaatctataaatgtatttctgtccataccattttttgagcaacccaggtataattctgcatcaataggaagaggtttcagagagacctctaggaaagctcatcatcaggaaaatattctccacactaatctccagcatgttttccttaagctgattcgatttttatattctcagataataggtgaaatttgaaatatattacaactacttgctttgaagtacttttcaattcagattacaggaagagaaagtgagattccagttgaatttgacaatccaaattcttcttaaacaaggacaagtagaactggaaaatttccagctagtactggagtattctgatgcaattctcatcaacaagaacataattgaagacttgaattctgtgattcgggtaattatactttttatttttattttaattcaaggtcttgctttgttactcaggctagagtcttgtggcacaatcatggctcactgcagccttaacccttagctaggctcaatagatcctcccaccttcacctcccaagtagctgggagtacaggttcacaccaccacacccagctaattgttttaaaattagttttttgtaaaaacagagtcttaatatgttgcccaggctgttctcaaactcctgagctcaagtgatcctcctgctctggcctcccagagtgctggaattaacaggcaggagccactgcacctggccaattatacttgtttaaagacaaaacatattgcctgctgtaccaaatattttacattattctcccattttcataagtaattttaattcaattaagtcagtggtttcctaactgtggttgcacattagaatcatttgaagaactttataaatgtgcycagaccccacccccaggatgagtattttttaaaagctccctccataattctaaggttcaagaaggatcacagagctaaatgtccattctagtatgccatcgtttttttaggcccagcctactcaggcaaagataatcttagataagcttagttagttgatttcagaccttacttcttttctaatatgaacatttaatgttatttctgtataagctttaggtataattgagtcctaaaaaaatattccctataagctttattttatctgtattctacaaattttaatattttgtgttttaattttcttttacatattttctaatttctgttgtgacttcctatttgattcatgggttatttaaaagcgtgttatttaatttctaaatatttgcggattttgtgctatttgggaattagatgataatgctactgtacattttatttttacaaatgctataaacacaaaacatattgctattattttttgctttagacaattatcttttagaataataaaaatgtgaaaagaggtattttctatttaccttaattttcactatttcaaaagatctttatttcattgtgtagatccaaatttccatcttgtatcatttaccttctgcttaaagaacttcctttaacttaattgaagtacaagcctgctagtaatgaattctctccatttttctttatctgaaaaagtttttaatcaccttcattgttgaaagatactttgctagattcactggattgccaggttcgttcatttgttctctctctctctcttttcattttaaagatgttcattttcttctgaacatctagatagtttctgacaaggtttctgctatattttttatctttgttcatctgaatttaatgtgtctggctttgagattttttatttgtttttcagcagtttgaacacaatgtgtctaggtggggatagggggcggtatgcacatgtgtgcgtgagattcttgagcttctctgagcttcctcaatctgtgatttgatatttgtcattatctttggaaaattcttatttattatctctgaatatttcttctgcccctttcgctctctctttttctactgggattccaattacacacgtgtcagattgtctgatactgttccacatctcttagatattccatactcattgtttttcactctttgttctctttatgtttcagtttgggtaattactattgccctatattcaagttcattcattcttatgctgtgtctagtctgataatgagcccatcaaaggcaaaatatctgttaccatattattgtagatagatagatagatagacagacagatagatagacttacatttagtatttctgtttaacttatactttccatccctctgctgaaattccccatttgttcatgcatgttgtctatcctttccaaaaatttttgttttagaaaagttgtaaagatagtacagagaattctcatataccccttatccagtttcttatattttattattttccatcagtatggtacatttgccacaactattgaactaatattgacacattattattaactaaagtacaaactttattcacttttccttagtttttacttaaggtcatttttctgttccaggatctcatcaggatgcattttatttagttgtcatgtctttctttttttttttttctttttagactgagctttgctcttattgcccaggctggtgtgcaatggcactatctcaggtcactgcaacctccaccttctgggttcaagcgattctactgcctcagcctcccgagtagctgggattacaggcatgcgccaccacacctggctaattttgtattttcagtagaggcggggtttctccatgttggtcaggctggtctcgaactaccaacctcaggtgatccgcccacctcagcctcccaaagtgttgggattacaagcctgagccaccgtgccaccggccagttgtcatttctttctagatagtgacagtttctcagttttgtcttgtttttgatgaccttgacagtttattgtagagtaatagtcagttattttgtggaatgtccctcaactgtggtttctctgatgtatttatcactattcgcctggagtatggagaaagagaccacagaggtaaaatgccctctcagcacatgatttcaaggatacatgctatcaacatgtcatcactgtttattgaatcttgaccacctgaattgaggtagagttttgtcaggcttctttactataaagttactttttctccactgttccatgctatactctttataaggaaattagtcataattattttaaatttcccatctgatagttctaacacctgtcatctctgatctaggtgtgttgattgctttgtaacttagttttttagagatatttttattgtggtataatacacataacataaaatgtactattttaaccatttaaagtgtgcaagtcagtggcaattaatacatcgcaaagttgtgcagctagtactgctatctagttccagaacatttttgttttgttttgttttttgttttttgagacagggtctggctctgtcatctgggctggagtgccggagcatgatctcagctcactgcagcctccgcctcccagactgaagccattctcccacctcagtagctggaattacaggcacgtgccaccacacctggctaatttttatatttttttggtagagatggggtttcaccatgttgcccaggctggtctcaaactcctgggctcaagcgatcctcctgccttagcctcccaaagtgctggaattacaggagtgaggcaccccacccggcctcagaacattttttatcatcctaaaaggaaaccccacacccattaagcaattattccccatccacctcttcccttagcccctggacaccactaatctgcattttctgtatggatttgcctattcttagtattttgtatgaatggaatcatacaatatgtggcctttgttttctggcttctttcacttagcatgtttttaagatttaaccatgttgtagcatgtatcagtcttcattcttcttttgtgaccaaatcatatttcattttatggatatacattttgtttatccattcatcagctggtgaatatttgggctatttccaccttttggctattgtggtgcctataactgttcatgcacaagtttttgaaaacctgttttcagttctctggggatatatacctagaagtggaattgctggatcgtatggtcattgtatgtttaactgattgaggcactaaaaactgttttccatagtagctgcaccatttcatattcccaccagcaaagtatgtgggtttcactttctctacgtccctatcaaaacttgttattgtttctcttttttgttgtttgcttgcttgctttttaattacagccatcttagtgggtttattcttgatgtaaatttctctaatgactaatgacattgagcatcttttcatatgcttgttgaccatttgtatatctttggacaaatgactactgaagtcttttgcccattttcaaattaggttttgttgttgagttataggagttttttatatgttctggacattaaacccttatataatttgccaatattttatccccttctgtggattgtctcatgtttttggtgttaaatctaagaatcaggccgtgtgcggtggctcatgcctgtaatcccagcactttgggaagctgaggtgggatcacctgaggtcaggagtttaagaccagcctggccaagatgtgaaaccccgtctctactaaaaatacaaaaattagccgggcatggtggcaggcacctgtaatcccagccactcaggaggctgaggcaggagactcacttgaactcgggaggcggaggttgcagtgaggcgagatggcgccactgcactccagcctgggtggcagagtaagactctgtctcaaaaaataaaataaaataaaataaaataaaataaaataagtaaatatctaagaatcaaatctgaagtcatgaagatttatccctgttttctttcttcttttcttttcttcttttttttttttttttttttgaaatggagaaatggattctcgctctgtctcccaggctggagcacagtggtatgatcttggctcactgcaacctccatgtcccggattcaagcgattctcctgcctcagcctcctgagtagctgggatttacaggcgcccaccaccatgcccagctaatttttgtatttttagtagagacagggtttcaccttgttggccaggctggtctcaaactcctgacctcaggtgatctgcctgcctcagcctcccaaagtgctgggattacaggcgtgagccactgtgcctggcctcagtccctgttttcttctttgaagtagggaaatgttagccatccaactttttgttttcaatattgttttggctattcatgatcctttgcagcttcatatgaatttgaggatcaggtttttccatttgaaaaaaaaaagccattgaaattttggcagtgattgcattaaatctatagattcctttgaggagtactgtcttaagtcttttgatccaagaacatgggatgactttccatttatttaatctttatattctttcagtaatattttgtaggtttctttgtacacacactttttagataaactttatttctaggttttttctttctgatattattgtaaatggaattgatttattaattcttttccagatttttcagtggtgatgtataaaaatataactgatttttgcatattaatcttatactctgcaactttgccaaatttatgtattatctctagtagggtttttgtggattctatatgactttctctatatatatagaytcattaatctgtgaatagaaattgttttacatcttttcagtttgggtgccttttatttcttcttcttgcctaattgccatgactagaatttttattacagtgttgaatcaaagtgacaaaaagtgggacatccttgtctcgttcctgatcttagttggaaagctttcagtcttttatcattgagtatgaagttatgatgggttttctgtaaattcccattatcatgttgaggaagttcccttttattccaagtctgttgcatatattttttttaatcattgaagtgtgctggattttgtcaattttttttttctacatcaattgacatgatcatgtgagtttttaaatttgttctgttaatgaggtatattatattgtttgattgtgcggactactcttgcaatcttaggataaatgacacttggtcatagttataatcctttcaatgtgctgctggaatcagtttgctagtattttattgaacgtttttgtctttgtgtatgtattcataagggatattggtctgtaattttcttgtgatgtctttctctggctttggtatcaaggtactgctggcctcatataatatattagaaagtgttccctcctctyctattttttggaaacatttgagtagtattggtgtaatttttctttaaatgtttgatagaattcatcagtgaagccttcttgtcctgggcttttcttttttgggaggtttttgataactgattcaattatttacttgttttaggtctattaaaattttctattactttttgaattggtttttatagtttgtgtgtttctaggaattttctatttcatctaagttacctaatttgttggtgtagaattttcatagtattctcttataatccttttaatttctgtaatattggtagtaatattcttgatttcatttcttattttagcaatttgagccttttttttcttagtcagtctagctaaaggtttgtcaattttgctgattttttaaaagaaccaacttttggtttcatcattgactattgtttttctgttttctttctttctttttttgagacagggtcttgctctgtcacccaggctggagtgcagtggcatgaacacggctcactgcagccttgacttcctgggctcaagtgatcctcctgcctcagcctcctgagtagctgggaccacaggcgtgcaccactattccaggctaattttttgattttccgtatagttgaggtcttgctctgttgcctaggctggtctcaaactcctgagcttaagcattcctcctgcctcaacctcccaaggtggtgggattacaggcatgagacaccacacccagcatcaggtgggaggacaatgaatagggatacaaatgcatacaggttggtagattgggtgatggcaaaaaaaagttcctgcctaattgttgacatataaagtaaattggctctgctatttaaatgtatcttataatcccttctgtttagtgactatcatgctttatagtgatcagattttgcccaagaagccatttttaatgtctgtttcttaaaaagaagacagaattatctctgtgacccaagtattttctaaaaatagcattcagcctcaaatattctatgttctatatgcagaatcatattatatggatatctaatgtacttttttaaagactcaaggacaaaagaaagttgctagcatgatggaaagtaaagatgtacacaaaagaatacttcagattgagtgggaacataagaaaatggagatggaaagggaagatctaaatcagaaggcttgggatattcagatgctatttttttcaagagatcgtcaaaaggtaaattctccctacccccctacatagttttaattttattcattaatgtattcattcatttaaccagtatttaataagaagcytctgtgatatcaagcatattctaagccaggagtgtttcaaaatatatctgtgagttatttttcttccaacagtttacatttgcagcctccagttcttcatgacccatttagtagaatcattctactcagagctaaggatttcctgtcaaacccggtggtccttcaattctctgtagcatttaaccatcttaatttctcattcctttggctttcatcaccccaaattaattttgcttccaacatgtcataccactctacctcttttactggattctcttttgcctctaacacttcaatatagccgttcttcaagattttgcccttagctatgtttgtgtttctttccatacctctccctgggtgatgtcctctgtttttctaacttcaacgatcactcctacaaactaatccaagttctgtggattccaagccatgccccatttctatagttttcacctcccagcagctcttcttagtttgccttttttgtacatcccaaatctacttttcaaggtctagtttaaataccaccttctccttcataaaacctttcttgattttccaagcctggagaaattccatctcattacaaaccacctttgaattagcatgacactctacatggcttctggcaaccaatcatatctatgtgatcattttcccatgaagactaggacatgttatctatctttgtatctccctcagtgtctttaactaggactttgttaatgtgggactcaagtggmacacttaaatgtttggtgagttgaataaatgaattaatgaatgagaaaataaagtaggcatttgtaataattggtgctttgatgtaataattagtgtacatgaatgtattgatggctaaatacagggaaatattatggcacaaaagccaaatcaatctttttttgttttttttgagatggggttttgctctttttgcccaggtggagtgcaatggtgtgatatccgctcactacaacctccacctcctgggttcaagcaattctcctgcctcaccctcccggagcagctgggattacaggcatgtgccaccacgcccaactaattttttgtattttttagtagagacaaggttttaccatgttagtcaggctggtcttgaactcctgacctcaggtgatccacctgcctcagcctcccaaagtgctgggattacaagcgtaygccaccacgcctggccaagccaaatcaatcttaacttgcatagatatttgttatgaaaaacagtaactttcaaagctaaaacaacctttataaagtcatctattgaaagagagaaaaatatccttacatgtttttttttaatctcaaagtacctaaatgaaccaaactatgaggctctgattagtattcagattggaataatggaacaaaccattgctgttttagataaggtaagtctcaaagacgttggttattatatcctaacagttgtaaatcatttgagcaaagtaatagtgtttcaaatcatgaatttacctagaccctaataaaatcttggttatttactagtattcatgaggtaattaaaagtccctaagtagtatctttgcaaccgcaactaatgaaataaaattaagcacttcctttaatattagaattaacccctggggacatatctgagtgtaagtggattttctattttacattaggttaggatttatgtaataggagtgttggtagtctttccttggcattggaaaggttttatttaatcatcactgaataaaaatggtcagtttttattatgtagcatatattagaaacaaagcaatctcaagcttttaaaatattctctcagtttaagaatatacaaaatgttttttctaaaatttgttattaacataccattctacctttcaacaaataactcgagtgcctactatgccaggcactacagatatggcggtaagatgttatcttaatgatgataatgtatttaaaatataagaataatgtctttataggataaattacatttttcaaaattaattttgtggggtgtcatgggaacaaaaatttcagatgcacaaaaagaatgtggaaaactgcaagaaactactcaaaaaacttggaaagttcagcaatcaaaaagatatagcaaattatgccctaagctgcaatctacgagaagagttggtagctgtctcagagagaaaagacatctgtaatgcaatgggtaagcatgcttttttttctttaaccaactgtaggtttctttaaaagtaatcagtaatcctaaaatgtatacaacagttaaaaagctatcagcatttctttaaaaatacattgtttaaaataatttcaacttttattttagattcagggagtacatgtacaagtttgttacttaggtatattgtgtgatgctgaggtttggggtacggaatgattccgtcacacaggtactgagcatagtaccccataatttttcagcccttcctccctccctgcctcctccctctagtagtccccagtgtttcttttctttttttttttttttttttttttgagacagggtgtccctctgttgcccaagctgcagtgcagtggtatgatcttggctcaatgcaacctccacctcctgggctcaattgatcctcccacctcagccccctcaagtgcctgggaccacaggcaggaaccaccatgcccggctaatttttgtatgttttgtagagagtaggttttgccatgttggccaggctggcctcgaactcctgagctcaagagatccgcccacctcagctaaccaaagtgctgggattacaggtgtgagccaccacacctggcctccaagtgttccctgttaccatctttatgtccatgagtatccactgtttagctcccatttataagtgagaacatgtggtatttggttttctgttcctgtgttaatttgcttaggataatggcttccagctacatccatgttgctgcaaaggacattatttcattcttttttttatggctgtgtagtgtcccatggtgtatatgtaccacattttctttatccagtccactgttgatggggcacctagggtgactccatgtctttgcttttgtgatagtgctgctgtaaacatacaagtgcatatgcctttttgctaccagcatttcttccacatgtatgattctgagtgctgcttctgtatttgaaagtattgataaataatcgaattcctttattcatttttgggatagggtctaaactgacttgtgaaaagattgtcaaagaacggtatgaaaacatgatgcaacagcagaagttaacaaatatttcaaaacaacaagctgaacagatttcaatactacagactgaagttgaaagattaagaatgaaaacatttcctgctcttgttcaaatgtaaaaacgctggcaggaaaacacaaggccaaatcaatcatttaaaaaatcatttcatttgggtaaaatgatttccttttctttcttactgggaaattgaagtagcatgtcctctgagttgcatgttttagataaaaaattgtttaattttagccttaattgtatacaaatttttgtcctgcatgaataaatgtgtaaaataccatgaattgctgtttttattcaagaataaacaagacttgaagtcagaaagtattcaagatctattttactcatttaatctgagttggatcaaagatattttcatagttatggtatagaaagtcttaaaaagaaattctttgccaaactagcatttctaattttatgaaactgtcagaaaagttatgagattatgggtaatttttatctttatgctcttctgtttctcattttcttcagtaagcatttctttcataatcagaaaaaaattacgagagtatttagattattctctgctgcaccaatgagaacaagacaaattgttagagctttttccaagccttgtatcatttgtaaattacaacatattttggccagacacggtggctcacgcctgtaatcccagcactttgggaggccgaggcatgtggatcacgaggtcaggagatcttgactaacatggtgaaaccccatctctactaaaaataaaaaataaaaataaaaataaattagccgggcgtggtgggtggtggcaggcgcctgtagtcccagctactggggaggctgaggcagcagaatggtgtgaacccaggaggtggaggttgcagtgagccgagaatgtgccactgcactccagcctgggcaacagagcgagactccatctcagaagaaaattacaacatactttagagacataatctacatttcttttatgttgtaatagaaaattcaattttgtgctttacccaatagggtttaaccaacagaaaaatactttcttatttccatgaagtagtttatcacttttagatggtgataattatataatgagatgaataattggccataaaactgctttgcccttccataacctgtggactgctgtccacagggatcatggaccacaatctccaagtgatgtcactgtctcactgttctgcaatttatgaactcaacgttaagtttaatcctcagtaccatatccaatatacactgatgtagataaagcaagagagctactataaaatcttctgtttagcaaaataaatctttagaagatgtaattgatcacccacatagtgatctgtgctggatggggatggtaagggaaatgataggaccaacactttgatgattcccctcctttgtactagacggactcatgaagtagtcagtttggcgtattcagtagggaagtgcccatgggtaccatttcctacatctggggtccttcaaaattatccctgagatgagagttgtggggacagaccccagggtaggggtgcaaatactttatacttaagatggtattgccagaagttctctgtcctgttggtttgagtcaaccatagatgtactagacttgattttttttacaatcttttctggtgacacaaactccattttcacctaagttagctgtctggagactccatttgctagtagtgccacaaatttcactagataatgctctgtggattcccaggtcttaacaaagcagccggcatcatttctatttcttagtcatcaacctttgttgactctggcaatgttccttgcttgactgccttactttgaggcatggatggagtggggcttagtgggcacctcttgccatcaagccctattccagaagccctttcaacgggagataccttctggttttggggctttggaaggacatgtgggtcatgcacagtaactcctctcttaatactgttcatggtattgactcctctcagcttctgctgaacagcaaatatattcatattttatagtcctttaaaatattatttatattatcaactagtgatataattaactggatcagacacagtatggctttatgcataggaattaaaattataggatctattcctgggcttcaaatcttggctctgccattggagttttaaataacctcttaattttgaaataactatcttatatttcttcttctttaaaactggaatattctagttttttaaaattaaaaacaagtgctatgttgtattagctctcatttttataagtaaagctgtcatagtcagtggtttttaataaaagcatcccattaaatccaacagagcagctgctgtgctgttggaacctcagcacccagtcaatgccctggaaatccccattaccatgcccctaagctttcccagaaccagagtctcgctgatgctgtatttcccccaagtgtatatatatgggtggctccaggtgatgtgcctgtcagcagtgggcagctgcagcctctgagatctggagaaataccataatgacctacaaaatgccagcaccaccacaaggggcaacatttcccctgccacatttaggcccctggttggcagcaagcagtgataagaggctggctgataagcactagaacagtagaagtccacaggggtgcccatctaggaatcccagtgctagaggcagctcatatgatgtctgggccagtctcctcagattcataaaggccagcggcacaggaatttgtgtatgtgggcagggtaagagtttactggcatggcactaacaattagaatggacacaaaagcagggccctggcgtctcctgctgtgccaaccattcaacactggttagattatgtggagggactggactgaaagtgggatgtacttgaggggggttcagaggagtgctaaactagtagggaagtgcttttgaaaaagctaagtaaagctgttttaacacttaaaaggacccaaaagcagaaatccagaaagctcttaagaatgactagcaactaaaaccaggaagccactgatccataaaattctctcctatcacctctgcctttctcggtaagcacactcactgcccttaagcatgtcagctctgctgcttccaggtatatatacaacagctgcagtcacaaaaagagatgggctttcttttcctgagctaaattccaaattttcagagactggcccagtttgggtcctatctccatatatggccaaaatgataggtacaactgtataatttggcagcagaaacccaacctgtggaggtgggttcataaatagaataaccaatctaaatttaacccatttcacagatgaagctagaaaggcaaacaaatgcgaagaaccttatatgccatgataccttcatgtgggtgggagataaggaaatgtagttttataagaagtagatggtttagccgggtgtggtggctcatgcctgtaatcccagcactttgggaggctgaggcgggcagatcacctgaagtcaggagttcaagaccagcctaaccaacatggagaaaccccgtctctactaaaaatacaaaattagccagggtggtggctcatgcctgtaatcccagctactcgggaggctgaggcagtagaatcacttaaacctcagaggcggaagttgcggtgagccaagatcgtgccattgcactccagcctgggcaacaagagcaaaactctgtctcaaaaaaaaaaagaagaagaaatagatggttgtttcactaaatgatgaatatgcaaaacacatttgaagagacagggaagaatatggttttggacatataagtttaattacctgctagactatcagatggaaatatgtggtaaatggatggaaacaaggtacataaacttaggaggcagaaatttttaaactttagggttagacattcaccagattggacaatttttaacatttaaaataaaactttttgtcataaaaaacaaatgtattaaaactagtttccagaactgcccaaatgactttttaaacatgacttaaatgtcgttttgacaaatctatccaaaatactaattttccttttagaacttagtttataatttatatattaaagtgcccttaattgatattcattgggataccttcctctgagccctaatggttttgggaggcctaggcggtggatcacctgaggtcaggagttcgagaccagcctggccaacgtggtgaaacccagtctctactaaaaatgcaaaaattagccgggcatggtggcgggcgcctgtaatctcagctactcgggaggctgaggcaggagaattgctggaacccgagaggcagaggttgcagtgagtcaagatcgcaccatcacactccagccaggatgacaagagcgaaactcagtctcaaaaaaaaaaaaaaagtgcctaagtatcttttaattaagttgtcattctcaaagatattctggagcaaaaatcaggaattaaacatctataaattcttcttcacttctgttatagtgtagtaatttatcatctaacccatagtggtctatcaattgagtaaggcttagtttcttgttctcttcagacacagctgactgcaactcataaagcaagagctggctacagcttctccacttctttattaacaactgtaactgagacagatcattctgaaacagaaaaaaaaacatgtatgtcaataactagtcatgctagttcaacttaattaaagttgttaaattagtggatgtgcaggtttaaaggctaacatacacagggatgaatgggacttctatctaggaaaaagtaggatggtcatatgtagaatggttacaatgtcactcaacttgagttctatggctattttgttggcttaagctctgggccatctttatgataagggaaaaatcaaatcattaaatagggccaaaactatgtcaagaagcaataatacagggaaaaatctactgtattacaactgtactttttaaaaaatgacactatgctttccactaaatgttgctatgaacctaaaactgctctttaaaattacaatattcaagttaaaaatatttttttaggctggggatggtggctcacacctgggatcccagcaccttaggaggccaaggtgggaggactgcttgagcccaggagttcaagactacactgtgcaaaatagcaagactctatgtctacaaaaaaataattttaaaaaattagccaggtgtgatggcacatgtctgtagtcccagctactagggaggctgagttgggaggatcacttgagcccaggagttcaaggctgcaataagctatgactgcaccactgccctccaggctgggcaacagagaccatgtctctaaaaaaagaatgaataaataaataaaatatattttttcaacattcaatactcctaaattttattttttaaaaactccagaatttcaagagaacaaatgagatacactatcccatcacttattccacgtaattcagggaaaatgagctattgcatatatatgaattttccaggtaataaagattattctccttccaagtacccaagttctatttaattcaacctatatgggttgaaatctaaaatataatatatatatatatatattttctcaaataaaatggctgaatcacattaattatttgggggagacacaagatcattactaaaaataccttttattgtactctacagcccatttttagttttactaattcactgtcagctttcacttctgttcccattgtacttgcatctaacatttaatacttctaatattgctgtgggctagaaactagagagaaaagtttaactgcatattaaatcagagctgagattcttaaaaagttttacctggtgtttaagggccttttctactctaaatctggagttgaattaaagctgttggaagccaggtttctgaatatttggcttattgcttattatggtaaaaaaaaaaattctatttttgaaattactttcctgtaatttatgtaaaaataaaaattatgcaatggtcctgaaattcttctcacctttgatctatacattttgactagttttagcctccgaagaaggtcttctttctcctgaacctgcttcaccaatttggctttttcagcgtttaatctttgtttaggaagcttctcactcacaaactcattttggagagcactgcatgatccagaatcaagtgactgagattcacagacattgagattcttc

SEQ ID NO: 6810 - DNA, 22262 bp, Homo sapiens
aaaaaaaggttttttttaaactaagaagtataatatctgcagttgtgcttatgaatgctgttattatttctccatcttcgctacaatttcagaaactacggccagtatacactagaatagcaggctttaaagtggcccctttgaacaaatgttctctagcaagacactttttagaaccaggtaactgtaactattaaactacctacttgcaaaacgtgtttggtgtcactgggtctcttggtactgggttttgttttgtttagtttagagacaaggtctagctctgtcacccaggctggagtgcagtggtgcaatcatagctccccacagccttgaactcctgggctcaagcaatcttctagtctcagcctctgaaagtgccaggattacaggtgtgagctgtagtgcctggtcccgtaaaaacaaaaacaaaaaccaacaccagatgtggtggctcatgcctataatcccagcacttgggaggccaaggcagaagggtatttgcatattttgtagagacttgagcccaggagcttgagaccagctgggcaacatagtgagaccttgtctctaaaaaaattggctggtcatggtagtgcacctgcagtcccagctacttgggaggctgagatgggaagatcacttgagcccaagaggtccccaagaggtccaggctgctcacatcactgcactccagcctgggtaacagagcaaaaccctttttcacacacacacacacacacacacaaaaagccagagcagtggctcacacttgtaatcccagcactttaggaggccaaggcaggcggatcccttgagcccaggagtttaagaacaccctgggcaacatggcaaaaccctgtctctactaaaaatacaaaaagttagccaggcgtggtggcacgaacctgtagtcccagctactcagaaggctgaagtgagaagatcacttgagtccaggaagtggaggctgcagtgagccgtgactgtaccactgcactccagcttgggagacagagtgagcagagtgagaccctgtttccaaaaaaaaaaagaaaacaaaagcttttccattgcaaatcaaccaaaaaggaacgtctttaatacacaagaaatattcttcagtctacttaacttaaaaatgtaactgtaatagatgcttttctcttgacagcggccccggcagggttggaacttttcctagtcaaaacccccctactcactctgcagacccttcctgaaggtcttcgccccatactgagcccatcttcagtcccttcacttgttccaaactagcccaatccatgacccttctctgggagctcagccaatagatcccaaagtaccacagcagcacctggctgcagaaggacccccgggaaatgcagtcaggggtgagaagatgggtgggctgaatgagctcggccctctctgggccttagtgctggcatctatgagatgaggacatgcctgaagtcagcctggaattttgagcccaggttatacctggtaaatagaactcccaggtctccggatactcaccactaaaacaatagcacctcattgtttttgttttgttttgttttgttttttaattatactttaagttctagggtacatgtacacaatgtgcaggtttgttacataggtatacatgtgccatgttggtgtgctgcacccattaactcatcatttacattaggtatatctcctaatgctatccctcctccctccccacaccccacgacaggccccagtgtgtgatgttccccttcctgtgtccaagtgttctcattgttcaattcccacctacgagtgagaacacattgtttttaaccctccccagcagcttctttaacccctccatttcccttttggcggagacccttgtcatcactcctctctaccaccagtgctctcccctcctgcactgtcccaggcttcctcattcttcccttgcaggtccttatccaacatggctcacaattcctgggaagccacaaggaaaccaaattctagtagcaactcagagtcagcattcattagcaggtcacagggccataaggatgccaagaaggaatttgtccctctccttgtcctgacaaaaggcataagtagaagaaaattgttaggtttggttatgacctttgacattctctctttgacatcctccctttctgcacccctcttccacctgtcagggcacctagggctccccgggtccccacaagtgtctgccctaaggcccaccaggctttcttgcagcctgtcccacatctgggtgtcactgccttcctctgaatcaccctcctctcaaaccagccgccagcgagcccagcccagcccagctagtgccctaccacacccgcccccaggataattaacacccagccacccagcatcggacctctacacttgagcaaaatgtatattttaaaggcaaattctcacgcctgtaatcccagcactttgggaggccaaggcgggcggatcacgaggtcaggagattgagaccatcctggctaacacagtgaaaccccatctctactaaaaatacaaaaaattagccaggtgtggtggcacacacctgtaatcccagctactagggaggctgaggcaggagaatcacttgaactcaggaggcggaggttgcactgagccgagatcgtgccactgcactccaacctgggcgacaaagcaagactctgtcaaaaaacaaacaaacaaaataaaggctaagtaactgtaatcaagtaactatttattatttatttattttagtgtatccacaggttgtgcagccatcaacactatctaattctataacattttcgttaccccagagaaacttgtaccccttagcaatgactccccatttcttccccccaaccaaccccagccccagccccagcccctgggaatccctaatatactttgttttgttttttgttggtggtgtttgagacaggatctcactctgtcacccaggctggagcgcagtatcatgatctcagctcactgtaacctccacctcccgggctcaagcgatcctcccacctcagcctccccagtagcttgggcctacaggtgtgcaccaccacacccagctaatttttgtattttttgtagagacggggtttcaccatgttggccaggctggtctcaaactcctgagctcaagcaatccacccacctcaacctcccaaagtgctgggattacaggcgtaagccactgcacctggctattttctttctttcttttcttttttttttttttttgagacggagtttcactctgttgcccaggctggagtgcagtggcgtgatctcggctcactgcaacttccacctcccgggttcaagcaattccctgcctcacccggctattttatatttgttgatctgctgctggttatgcctgtgagccaaatttgtacaaattcttaagctttacaatcatgcgtgcctctctgtacgtatattatactttaattaaaagttattaaagtattggggccgagcacagtggctcacgcctgtaatcccaacactttgggaggctgaggctggtgcatcacctgaggtcaggagtttaataccagcctggccaatacagtaaaaccccgtctctactaaaaatacaaaaaattagccgggtgtggtggcgcacacctgtaatcccagctacttgggaggctgaggcaggagaattgcttgaacccgggaggcagaggttgcaacgagccaaggtcacgccattgcactccagcctcggcaacaagagcgagactccatctcaaaaaaataaataaaaaataaaaaatgtatcagggagtacaagagaaagtcatataagctctttctacttttcatggtttctatgtctgaacccatgaatcttccttctgaaaggtccaactttcttctttaataacaataataatggcaaaggcattgggggaccgtgagcaaagggcaggcctttgcaggggtgggaatggaaagggaagcacgtccctagaggtgggcctgggatgggggttgggggatgaagcaagtggaccttgaaggtctccacaggtctgagtgtcctatgctccctgggcctctcttcccccaggtcttctcgttcgcaactgcaccatcactgccaatgctgagtgtgcctgtcgcaatggctggcagtgcagggacaaggagtgcaccgagtgtgatcctcttccaaacccttcgctgaccgctcggtcgtctcaggccctgagcccacaccctcagcccacccacttaccttatgtcagtggtaagttccaggcaactctctgtgccatcacgtggggtagcggtgataccccaaccagtactccccactcctacccctagataaggtcagcctgtttctgccttcccatcccatccagcacctctcaggccttcagatgtgccctatggggtcccctgctgctactcattctgtctctgtttttccagagatgctggaggccaggacagctgggcacatgcagactctggctgacttcaggcagctgcctgcccggactctctctacccactggccacgtgagttttctccttaatccccaccgctagagagaatgcatacacgaggggccaggagggaagccagacagaaagctcctaggattagggataagaggaggggaaaaagcagagtccactgtttaggagaggagttggccaacggtggcgggtgggatagaataaggtgggggaaaggggagaggcaaggtgacaggagggctgggctgagggagccaagggctagaccctcccctaacccctgtgtgtcccctcctattacagcccaaagatccctgtgcagctccgattttattcgcatccttgtgatcttctctggaatgttccttgttttcaccctggccggggccctgttcctccatcaacgaaggaaatatagatcaagtaagagacagaacacaggcctccggtcctgcccctgcaccacaccccactggctcaaccccactgcccacgcctggaatctcactgaaacccaccagctccacttcaccagccttggtcctaccccttctctccccttagctggcgtgctcctgacacccctcccccaagcgcacccgcctctacccatctccttctcccgtctccccctgcccccactgctggccaagactcatcggatctccttctgcagacaaaggagaaagtcctgtggagcctgcagagccttgtcrttacagctgccccagggaggaggagggcagcaccatccccatccaggaggattaccgaaaaccggagcctgcctgctccccctgagccagcacctgcggkagctgcactacagccctggcctccacccccaccccgccgaccatccaagggagagtgagacctggcagccacaactgcagtcccatcctcttgtcagggccctttcctgtgtacacgtgacagagtgccttttcgagactggcagggacgaggacaaatatggatgaggtggagagtgggaagcaggagcccagccagctgcgcctgcgctgcaggagggcgggggctctggttgtaaaacacacttcctgctgcgaaagacccacatgctacaagacgggcaaaataaagtgacagatgaccaccctgcagctctccagcttcctctctgaaatcccagtcccaaaatccagtttcctggccgcctcctggctcaggtcaggatctggcagaggaggtttctcagccggttatgttggggcctgcttaagggcgggggtgagaaaggtccccaggctactgtggatcctgtgtctgacttcagatccccttttcccacagttatagctccacttttttgggacaggtggggagcaaaagggtgcagaggtcaggtcttgaaatcaccaggggatttccgggtgaggtgggtggtgagaaaggaaacagcaagcagggctctggcagctgctgcagacggcttcacacagggacgcgggctgccatcttgctctaagygaaagtgaaagaaaagtcggcagcagagggaacagggaagaaacctaaaggctgcaggctgccaggtgtgcttggagagcccccttcttccgccgggcctcgcaagcagcgtaggactgtggagaagggcggtgggcaaggagggaactcgagagcagcctccatgggcacacaggagggctggtgcctgctgctctgcctggctctatctggagcagcagaaaccagtgagtctgggagtcggggagagctggctgggagaagagctactgaagccccagggtgccaccctccccgagattccagaagagcaaaggggccggggatgaccccatcgccttctaagcccaacgggaaaggctcagcggctggcaaaggaaggaaccaatagtgtgtgtggagggagggtggggactccacagggaaaatgctaaagaggggctgcctctgtggctgtggtcaggagccactgtcctacagagagggcactggcctgggagctgacacttcagaagaggaaaggactccccaggtgaggaaatcacttggaaggtgaccttgaaggcgggggaggggaaggctacccgaaatgggagaaagcagtgcaggctgtcagtgccccagcaacagtaactgtccagtctcctctctctgcggtggcacttgcttgttttctgagaattcctttgactgaaaagatagtcttttattcaacagttggaaatgcaagcataaactcctctgagcaaggcaaatccaggactttaactctcaccaagaagtatttgcctggactagcaggtgctctccaraaagctggtttggggatgacgggagaatagagggacacagaaacagctaggatcttggatggcaacttttaccctttgatgactccacagcttgagggcgggggcaggaagcaagtgtggagtagctttctggggaaggcggtgctcaccccagcctttgtctgcagagccccacccagcagaggggcagtggcgggcagtggacgtggtcctagactgyttcctggygaaggacggtgcgcaccgtggagctctcgccagcagtgaggacagggcaagggcctcccttgtgctgaagcaggtgccagtgctggacgatggctccctggaggacttcaccgatttccaagggggcacactggcccaagatgacccacctattatctttgaggcctcaggtaaaagccttcyacctgtgtccttggtcctcccgggctccctccaccaggacagcccaggtcccgattacagcyacacatactgcctcccgttggccctggtgttctcacgctaatttgccctctgtgtgtgccctgcttctccccagtggacctggtccagattccccaggccgaggccttgctccatgctgactgcagtgggaaggaggtgacctgtgagatctcccgctactttctccagatgacagagaccactgttaagacagcagcttggttcatggccaacrtgcaggtctctggagggggacctagcatctccttggtgatgaagactcccagggtcrccaagaatgaggygctctggcacccracgctgaacttgccactgagcccccaggggactgtgcgaactgcaggtaagaaaatgaaaagyaaggccaggtgtggtggctcacgcctgtaatyccagaattttgggataccgaggtcggtggatcacctgaggtcaggagtttgagatcagcctggtcaacacggtgaaaccccgtctctactaataccaaaattagccgggcatggtggcgggtgcctgtaatcccagctacgagggaggctgaggcaggagaatcgcttgaacccggaaggcagaggttgcggtgagccgagatcacaccatggcacttcagcctgggcaacaagagcgaaactccatctcaaaaaaaaaaaagaaaagaaaagaaaagcaagtcacagaaagttttgcttttctaaagtggtaagatatggggsacagaagaagaaagggaacaaatccacctccatccacactggtcacctcagggcacccctaggccttggtcctttcttcctaaaaacccctgagtcaggccaggtgcgaaggcccatgcctgtaatcccagcactttgggaggscaaggcaggtggatcacctgaggtcaggagttcaagaccagcctggccaacatggtgaaaccccctctctactaaaatacagaaattagccgggcatgatggcaggtgcctgtaatcccagctactcaggagactgagacgggagaatcacttgaacctgagagacggtggttgcagtgagccgagattgcgccactgcactccagcctgggcagctgagtgagacaccgtctcaaaaacaacaacaacaacaaaaaccctgagtccacaagagaatgcttcgcagcccctacctgaasgtccccaggcacacagacaacctgtgttatttccaaaatggagatcgttctcatctcactgggctgccatgaggaaataagacacatgatgctattctgtacatgggtgctgtccactgtagtcttatcgagccaaaacccggttttctsccagtgaaatgctaggctgctctggtgcttcaggggtaaagctcagggatgcatcatttgttcatgatcttattagtaaacccagtacttgccctctccagctcagcacatcctcgagggcacaagaaattgagaacatgatgacagggttccccagagcccattaatccaatactctgtgccctgcttctttgagtctccaagaagaaacagccaagtccagagaaaattaggggcaaccgtcctatccttggaaaaccccagaacactctaacctctctgtggtccaacctaaatctatcctgacccattagaaaaaggtcttcatgtctgtccagtgtctaccatactcctggcatgcrtaggtatttctctctttttattccaaacctacaaaaaaaggtgaaataataatataatgaacacctatataccctacacctagatccaccagttgttaacaatttgccacattctctctcccccgactcctcatgtgtgtatatgtgtacgtgtgtattttcctctgaactgagagtaagttgcagaagataacacttgaaccccaaacgcatgtttgaaccccgaaacgcatgtttraaccccaaatacatccatagcatgtattagtttacaatgaaggacaaggatgtaatccttcatagttacaaagccatcatgtcagaaacaaaccaaagtggggaagtagtctacccgtagcgcaggcaataagggagtgcagactgtaaaatatttcagaacaaaaataaaatcagctaaaagtcagatggctttatagtctcaccatctcccgacactggcaattctgaatattatcagtgataaaatactcctctctgctagggcagactgtccctatctccccacacgactgcctagtatgccacagatcttcatacttttagatattttttaattgatatgatyatagtctcaactataaagtccagggcatggkggtgcacacctgtagtccagctactcaggagactgaggcaggaggattgcttgagcccaggagtttgagtcctgtctgggcaacatagrgagcgagaccctctttttttttttttttttttaacagtctcattctgtctcccaggctggagtgcagtggcatgatcttggctcactgcaacctctgcctcccaggttcaagtgattcttgtgcctcagtctcccaagtagctgggattatagacgcccgccaccacaccagctaatttttgtatttttagtagagatggggtttcaccatattggccaggctggtcttgaactcctgacctcaggtgatccacccatctcggcctcccaaagtgttgggattacaggcgtgagccactgtgcccaacctaagacccttctctttaaaaaataattaaatgtctccaaattcaaatttctccacttgtcccaatatttttttttttactgctttttctaagtacacaattcaaacaagaatcatgcagtgcatttagttgtgctgttccttgttttaatctagaacatgtttcatagaattgacatttttgaagggtccaggctagtggtcttgtagagtatcccaacatttagatttgtctgattgttttcctcatttcctcatgactggatttaggttaagcatgtttggcacagatactactatcacatgcttttttttttttttttcgatatggagttttactcttattgcccaggctggagtgcaatggctcgatcttggctcaccacaacctccgcctcctgggttcaagtgattctccacctgagcctcccaagtagctgggattacaggcatgcgccacgacacccagctaatttttgtatttttagtagagacggggtttctccatgttggtcaggctggtctcraactcccaacctcaggtgatccacccgcctgggcttcccaataccacgtgtgtttttttgttttgttttgttttttacattttttttgagacggagtttcactcgtcgcccagactggagtgcaatggcgcgatcttggctcactgcaacctccacctcccggattcaagcaattctcctgtctcagcctcccaagtagctggaattacaggcacctgccaccatgcccggctaatttttgtgtttttagtagagacagggttttaccatgttggccaggctggtctcaaactcctgacctcaggtgatccacccacctcggccccccaaagtgctgggattaccggcatgagccaccgcacccagccaccacgtactttttaaactattgtttctagtcttcacagcatccttgcttaagcaggtgagcttggtaacaccaagtgacttgtcaaaggtcacggagccagtaagtggaacaaccagggtttcagagctttttctgctactctagtagttcttacctgaagattgatggtaactcttaattttgcatgtgtatttttcctggtgggagatccatagctttcactaaattatcctagagtaagtgatcccaaaatggtgatggccatcatgtgtaccatgctacctttccagagccccatttctttgtggttccatgtgatggaaaataagctcaaccggcctgtcaggcgaggaagaggcaggtgtatgcccacaacatgcccacagcttggagatcaggtgacctcaaggaggaagtagcccacaaatcacccctcttttcctcttcacagtggagttccaggtgatgacacagacccaatccctgagcttcctgctggggtcctcagcctccttggactgtggcttctccatggcaccgggcttggacctcatcagtgtggagtggcgactgcagcacaagggcaggggtcagttggtgtacagctggaccgcagggcaggggcaggctgtgcggaagggcgctaccctggagcctgcacaactgggcatggccagggatgcctccctcaccctgcccggcctcactatacaggacgaggggacctacatttgccagatcaccacctctctgtaccgagctcagcagatcatccagctcaacatccaaggtgaggccaggacatggttatcccagggaaggggatataacatgtctactgggagcgtttccagattgggacccaaatgcaagaatgatttcctgagaagcaggcttcaatcccacaacttaaatgccatcttcaccatggaagcacagatggcatcagataaggagtcccgttggactccaggataattccaccaagagatttccagcccaggatcctgctgccctgctgtggctggctgtctccatcaccccagtccttttggaccacatcctgaggagcagcagcagcaaaccaaggcagagcagtggaagcggttctgaccattatcactgctatcctttaaaatctctggcttagaggccgggcgcggtggctcacacctataatcccagcactttgggaggcggatcacgaggtcaggagttcaagaccagcctggccaatacggtgaaactccgtctctactaaaaatacaaaaaatagctaggcatggtggtgcgcgcctgtagtcccagctactcaggaggctgaggcagaagaatcgcttgaaccccggaggtggaggttgcggtgagccaagatcatgccactgcactccagcttgggcgacagagcaagacaccatcttaaaaaaaaaaaaaaaactggcttagaatgacagtaagaagccarccaatctttagttggctttactatctgttttctggaaaatgtaaccctgcccccttacggcctgcatccaggtgggcccctcacacacccccgccttggtacaccaccaagggacactgtagcctccacaatctactctcatcttggcaggaagaaaaggcttcaggctcctccgctgtccccagttagatccatgtgtaatcttattcctcattctttctccagcttcccctaaagtacgactgagcttggcaaacgaagctctgctgcccaccctcatctgcgacattgctggctattaccctctggatgtggtggtgacgtggacccgagaggagctgggtggatccccagcccaagtctctggtgcctccttctccagcctcaggcaaagcgtggcaggcacctacagcatctcctcctctctcaccgcagaacctggctctgcaggtgccacttacacctgccaggtcacacacatctctctggaggagccccttggggccagcacccaggttgtcccaccaggtactgggagtgtcctccttttccccacctccacactagggctcatggctctcctgccccagctcatctatggccttgttctgctgcccatccactttgttcgcagccctggcttcatgctcctgcctctgctcctgactattttcccaaggcggcagctgccacagcttctaccacacatcccctgagacttcattatactccagcctccagggtgtcaggcaatgtgcttaaggctggagatcacagatgaataattcctgatcatgccctccaggagcttagtccagtaatagagacaagactaagtagacagagaagatggcatttgagccaagttaactagcttagagggaagggaacactcaagatagaaacaatagcatatatgaaagccaaatcataaaacagcctaaagagaatttggagaattgcaagtaattcagcacagctagagcytagggtatatgggaaaaagggaaagtggctctgaagcttcggaggtaattctatttattgagcatttacatgaatcaagcagtgtagaaagcacttaaatgtatgatttcatggatcatgactcccattttacaggtgagtaaactggcacttgcagatgtcaatgaatttgcccaaggtcacctatcaatcaatggtaaagagagaatgtgaaaaacaggcaaccggattccccttacgggcttaattaaaccctgtagatctcactgggccttcaagctggaacttcctgagagccatagcatgctgttgaaaggttttatttatttatttatttatttatttatttatttatttattttattttattttactttttttcgatacagaatcttgctctgttccccaggctggagtgcagtggtatgatctcagctcactgcaacctccatatcctgggttcaagccatcctcttgcctcagcctcccgagtagctgggattacaggcgcgcaccaccacgcctggctaattttgcgtttttagtagagatggggtttcgccatgatggccaggctggtctcaaactcctgacctcaggtgatctgtccgcctcggcttcccaaagtgctgggattacagatatgagccaccgcaccctgcctgtcgagaggttttaagcaggaaagggacaggaaagaacccgcaacttgaagtggaaacatccaggagcactgggcattatttggttgctcattagactgtgaacttccccaaaactgaggtttcacttcagctcacatcattccccaactatttacaaaatcccagttaactggtggttttttgttttgctttgttttattttgttttgttttgagatagggtctcactctgtcgcccaggctggagtgcagtggcacgatctcagctcactgcaaactctgcctcccaggctcaagtgattctcccacctcagcctcccaagtacctgggaccacaggcgcacaccaacatgcccagttaattttttgtattttttgtacagacagggtttcaccatgttgcccaggctggtctcgaactcctgacctcaggtgatccacctacctcagcctcccaaagttctgggattacaggcatgagccactgtgtccaggcaagttaagtgctaacaaataaacccacctaaatctcacttgcaaagcaatttttaaaaccttgtccttaggtgggaagaggtagagaattctgtgtggagtaactcacaagtatccagcaaccttgaataagaacaaatgctgctgagtgccttgttccaggctcctcaaccagggactcacacacacaatccttagctcctcctccctggggtggacactgcaggtgagggctcagctcatgattcctgygcacgatgatccccrcccacgttgctctcacctacagagcggagaacagccttgggagtcatctttgccagcagtctcttccttcttgcactgatgttcctggggcttcagagacggcaaggtaagagcctgggtgcccttggctctggccctggcccacctcacccactctaaccaccyccccrcccagaccagggtggaagcccasatgccccaagctccagccacccacccatcacagcctcctgcttttgagtttgccctaaatgaaaatgaaaccagtcgtgttccctcgttttctcctagctacctcactaaagtctgtcactctcctgcctcagagtagaaagaaagagtagtcacgtgctcccagaaggactctaagtcaagtcacagagctaaaaatacatgaaggtggcaccagctcatggggcactgggcctggctctgcagaggcctctgccttccttcactgtgcaccctgggctcatgcaccaaggcagagaacaggaagaagtgaggggacaagaagaaggcagaatgtccagatggaggwtaagaccaaagagccaggttggtggtgtgacggtaggaaaacaaagctggaggaaatggagaaggaacaagtgagggacaatgaggcatgggttggggctgggctacccctcccaaactcagctctgtcaaaataaaaggcccttgtgtctgctgcgaccaagcttttccactttcctgtctttctccacactggtcccaactgagccctgtcaccaagcctagcggctccaacttgcaaagtgtttaagtatgaaacaaaggccctcagaggcacccccgkggctccatctcagttgcacctcagctgcaattagggttctgctccctcgggtgactgctgggaggttcaggatacctgcaaatgcctcactccctcagctgcaaggagagacttctcctttttattcgtttctaaaatgtgcctratcaatacggtggaactcagcataccaaaactgtacgtgaggatgatggggaaaagggggtaagggggtgttcactgacagccttatctgggcacatcccctgggacaggacaagcaggccaaggacctaggaaggagcacaggaggcagatggaagaggcctgagggaacctgtgcttgtttgccagtgtgagatgcccacgcaacttcctgtcttcacttcctcttaccagcacctacaggacttgggctgcttcaggctgaacgctgggagaccacttcctgtgctgacacacagagctcccatctccatgaagaccgcacrgcgcgtgtaagccagcccagctgacctaaagcgacatgagactactagaaagaaaygacacccttccccaagcccccacagctactccaacccaaacaacaaccaagccagtttaatggtaggaatttgtattttttgcctttgttcagaatacatgacattggtaaatatgcmacatgcctttggtggaagtacaactgttgttattactctatacaagtatgagatcagggttaggaaaaaaagacaaagaggtgatgacagacacacagtggaaaccccacatcgtctcatggcaaaccgaagaacgggatgtgggaagctcagcttcatttgactgcaaagtcccagggttttgttgcacatttgctcatgcacatgggtggtgggaggaaagggggatagcaragacacacagaagagggtacagggtgggtgagaaagaaagtagaagggctaatacccccaaagaacaaggccaactacacctggtgagcctcagagggacagaaacccaggaatgattcctgtgatagggctgggagagccaagaggacggattcgctccaggcttgggacacatcgaggacagtggtggttcttctccagcggtgaccccctgcattaggcaaggaggagcccagaggagagtggagaccttcgaggggggccgttgggagggtactgactgctttcttccagctcttcagtcccgcccttgggcaggacgaagggaatgtgggaaacaagggcgaarggaaaggaaggatggttttgagcaatgaaatgctgctgcatggaaagtgggcatccagaccctgcccagcatggcctcagcctcttcctgttcgtggaccgagggaagaaggaataaagggccatgggcattctccgctctgttcccagcctgccctcctccccttgcacctgggcttatcccacattaatagcccatcctgaagctcagcaattgccccgaagataggctgagcagatcccatcctcaggttccactgtctatacacacaaaccatgcaaagaggaggaagagaaaggaggcaaagtagaattcagacaggaaagggtggttcaaaggggaatatactacaggaagaacagagaggcggctctcaaggagagggccccatgacagcacagcaatacacaagcacacctgacacaggctggcacgcctccccccaaggtggggctggtgggtctacatgacttctctgcatcctgaggatcggccgggccccaggaagaaccacttgcctcatccctgtctttggcaagtgcacgggtggtgtggaggaaaggattccatgggtgtccaaagatctcacactgctaacaccctcacgctccttcatcaacaggaagagaggaacaggaccctctttaacgagggcaaggagtggcttcctctgagcttgttactttcaaattaagcacttgactcactgtttctctataactaacaggcaatctctctctttatgccaacaattaactgggagctaggttaaattatttggctagataaaactaccagctagatggatttatttggtgccctcatacagaatgctgtagaaaatgtaaagaagagaaagctccttccagctagaagcacatgggactgcttctaggatggaaacaagtcctgctattttcacaatccctaagtgttctccaggcctctggagaacaaagtaaagttgtaagatccccaaagacacggaaaatcctggacgaacagattagaaataactacaaaaaacaagtttttactttcgaaaagggtactgcactgaaaccaagttggactttggtccacccccaggaccctctycaggcctggtccaggaaggaaagctccacatgaccaggcagtactgagtgagctgccatcttcccagcccctccctagctcctaccagtggccaggttttctagaagtcaccatgggcaccgatactcttctcctcccaagtctgggcagcttcatgggtacttcgcctcagccactcccctccctgccccttcccttggcctccaactctttggggctttgggggaacttgagagtacagaaaaagcaggcagggaggaggcgccagctgttgctcttcgggtaatgacttagattgtgccacgagcagcatttctagtgttgagggacagagtgcaaatgaacgcaacgaaaaaggaggaatgggtgatggagaagcctgggctggaatggaggacggtgggtggggaagtgtgttgagagagcaaacagagggcagaggacatgaatgtggatggcaatggacaacagggaaggggtggtacattctcaagtaaaaaagtagactggacacaggaatcaggaagtcccagacggaaaagagaaagagacaggagaaaacaagagggygaattacaccaagttaccagacattcaggtctytccattgttaagtgccccatccccatggtctccctccaacccaagccagtgacacacagcatagccccacttcctcagaacaggaggcgccatctccctgcaatgckttgcagggggaaggcttgtccatcaaagaaatcccttgtctctgcccttccccygtcccgaaccaggtgacgatcccatagcagcggtctccatacctcagtcagagcagccccactccccaggcaggcaggcaggcagggagaagactccaggaccttcccacctcttcaccccaccagcaacttcagcgatacttacttacaataactaccacgatgatggcacagatggctcccagcatgatcatcatctgaggaaacatggacaaaaaatgagcccttggatttcaggaatgaggaaaagagccacatctctagtgggaaacagaattccttccatccttgggacaatggaaaaaaccacccatcacccaggagacctgcaggcctcttagagaggccctacccttctgcttcccaggggatcataaccacagtatgtctgtagcttttcagattcatcacaggacctgcattgagctcctttttgcttagttcctggtgtcttggggctttagaaggcattccaatagagatacagactctggatatttaaccaattagttcaattttcactgtgaagtgttcagctcattctcaaaagttgcagttatttaaaaatatatatttcaatctgagaaagctgatttaaaagaaaaagaaaaaagtatatatatatataaatgtatatatatgtatatatatatataaatgtatatatatgtatatatatatataaatgtatatatatgtatatatacatatgtgtatatatagtgtgtgtgtgtgtgtgtgtgtgtgtatgtatatatgcctgagccattgtgctgatgttgggtgtgtctgaggatgagacaggtgaaattttttgcaggcaactcctttggggtaaagctccttaactaaccattccaaactcctcagggtatcactttttccctgatagcggttctaaatactctagcctaccctggtggccaattctgggtaatgcaatctcaagaggaggctttccagatttcctcccaagcgttatgctggtcagagagatcctgcaccattagagggaagaaatgtagaagctgagggttttcttgccttctaccagtggaagcccaggaaaagatggaggaggggacaagaaaattcaccttgcagtttttccaccaatacttcctctttagcttkgcagcactgctctcaaattgtgatgctcctgcctgcaaggcatcagctcggtcatccagctctgacagcttctggtccctctccaggaccttgtccacgttcacacgtatgatgtccaccacctgaggagggcacagaaacaaagctgctaagcttcctgccagagacagaggaaaggacaacaaccagagaatcacaagtctggccctgtgcaactctaaagggtgctttgcctctcagggcctttgactattctcctacgaaaaaaggagaaaagataagaagttcccttttgtttccaaactcctagatttggaaactttcagagaaacagctatctacctacctcctccacttgtgcctgggtttgctgtagtcgtctgttactggtcatgttaggaggagggccagggggacccccacctggggcagtcccttctgtcccttcagcaggtggctgagctggagcagacctgtggaaagacatgtgcagagtacacaaagtgaccaagacaagaaaggagctgggcgtggtagcacacacctgtagtcccagctactcaagaggctgaagtgggaggagcgcttgagcccaggagttcgaggccagcctgggcatcatagcgagaccccatctctaaaaaaacagacaaaaagaaaggactcacatgcatcctcaccccaaaccacttaaacaattatgattaggctatacaaaactagaatggattcttgctccttggcaatctgaagtagggagacaaaccatagaggcaagaagtaaaagatgaaagactctgcaacaacatttggatggggttcagggacatccaggatggcatcaagacatctcatctggggctatcctttgactcaactcaaacaagtcctctgccatgatggctacagggacatatggcctagccttgtcctaaatggcatttccccgctgatatggtttggctgtgtccccacccaaatctcaacttcaattgtatcacccagaattcccacatgttgtgggagggactcaggggaggtaactgaatcatggggcccatctttccggtgctattctggtgatagtgacgaagtctcatgagatctgatgggtttatcagtggtttctgcttttgcttcttccacattttctcttgctgctgccatgtaagaagtgcctttcacctgccgccatgattctgaggccttcccagccatgtggaactgtaagtccaattaaacctctttttcttcccagtcttgggtatgtctttatcagcagcatgaaaacagactaatacagtaaattggtaccagtagagtggggtgttgctgaaaagatacccaaaaatgtggaagcgactttggaactgggttaacagggagaggatggaacagtttggagggctcagaagaagacaggaaaatgcgggaaagtttggaacctcctagagacttgttgaatggctttgacaaaaatgctgttagtgatatgaacaataaggtccaggctgaggtggtctcagatggagatgaggaacttgttgggaactgaagcaaaggtgactcttgttatgttttggcaaaaagactggcagcattttgcccctgccctagaaatttgtggaactttgaacttgagagagataatttagggtatctggcagaagaaaagacgcagtactaaagaaaaaaaccatttttttgagaagaaattcaaggcagctgcagaaatttgcataagtagcaaggaacctagtgttagcccctaagaccatggggaaaatgtctccaggccatgtcagaagccttcatagcagcccctcccatcacaggcctggaggcccaggaggaaaaagttattttgtgggccaggcccagggtccccatgctgtgtgcagcctagggacttagtgccctgtgtcccagccgctcccactgtggctgagaggggccaatgcagggctcgggccgtggcttcagagggtggaagccccaagccttggcagcttccacatggtgttgagcctgcagatgcacagaaggcaagaactgaggttcgggaacctccgtctagacttcagaagatgtatggaaacgcctggatgtccaggcaaaagtttgctgcaagggcagggccctcatggagaacctctgctagtgtagtacagaagggacatgtggggttggagcccccacacagagtccccactggaacactgcctagtggagctatgagaaaaaggtcaccattctccagaccccagaatggtagatccactggtagcttgcaccgtgcgcctggaaaagccacagacactcaatgccagtccgtgaagggagccaggagggaggctgtacactgtaatgtctgtcagctcacccctttttatattcaagttattggttatggttattggtttatatgcccagttatt

SEQ ID NO: 6811 - DNA, 28953 bp, Homo sapiens
  misc_feature (1)...(28953): n = A,T,C or G, or insertion/deletion polymorphism (see Tables 1-2)
aggggcttggtagaagattcctgatagagaatagtatgtgcaaaggctatgatgcaaagaagagtagaaatttcttttgtatttttttgtagagacagggtctcgccatgttgcccaggctgatctcaaactcctgggctcatggaatccatctcagccacttccactcagctggaattacaggcatgagccaccgtgcctggcccaaagaagaggtagaaatttcatgagtgaaattagtatgctaacaatgagcatactgtttctgctcttaaggggccaagaacccatgagggagttaatatggatacagtaatattacaaagggagtgtggtcggtgaggttcttaaacaaaatgcaagaagttcagggttttatggagggagctcactggatttgatggcttagataagaggacagtaaggagggagtcccttttacctggagcagagcagcaggagacagagtcaaagagatcaacagggtcatgacgcaaaaactcttgaatggcaacatgagcatttgcactgaatttgataggaaaggggaatccaataaagatttctggccagggacatgatgcctccgttatgtgggaggagcaggcaaggtgccataggagattgcatgcactgtgacaggctgtgcccatgggggaggaaggaggaccgtgggattgactaaagatactgcttagcacgatctcctgctagtgctgaggaagctgagggcagaacccagctgggagattggtaactccactctgaagaatagcttccaagaacttggaggtttccaacccaggtacttggatagagcataggttttagagttggaaggacctggacccatgtcccagcttccccatctgttagataagtggctttgagcaacttactcaacctcactgagagtcagtttccttgtcagtaaatgagagtaatattagtatctctgctgttatagggttgtcgtgaaaactaaatgaaatgagagcatgtgtagccatagtgctggcactgggtcacctctttgtaaatattagcattatcattagcagaggtggcaggggagggttatgagttcttttcagataggctaagttggggtatctgtaagatcacccaatcacagacatctgtcaggcacttggcaatgaggatttggagcccaagagagagatcagagctggtgataaagatttgggtgtcactcgcagatagatgattacctaggagtagataaatcatccaggaagagggtgaagaaatagctgaggcaaggtccttgaggaacccttggggaggaggccaagtagaaaacccagagaagcttttggaagaggctaaatgcaaagacattctgcagggcccaccctggagggctgaggcatgggagaaggcaggccgctgactctcagcttcagcctcacccattcccctgccccaggtctgtgacagccttgggcggcgacacatgtctacctgtgccctctgtgacttctgctccttgaagctggagcagtgccactcagaggccagcctgcagcggcaacaatgcgacacctcccacaagactccctttgtcagccccttgcttgcctcccagagcctgtccatcggcaaccaggtatctagcccggcagcccgcagtgggaaaggcagaactgggtggcaggggtggggtggtggtggccagcaggtggggaggggcacgcacctctcccctatctcctgtgccacaggtagggtccccagaatcaggccgcttttacgggctggatttgtacggtgggctccacatggacttctggtgtgcccggcttgccacgaaaggctgtgaagatgtccgagtctctgggtggctccagactgagttccttagcttccaggatggggatttccctaccaaggttagaacctttccccaaagctcagccccatccctaccctcaccccattccttccagttacttgctgtgagtagcgctagtttgtggaagggggcttgggcccctggcttctgagaacccgtcctcactgaacctcctgcctctctccaagagaccattgcaccccaccccaccctccaccaatagagcaggcaaaggagtggggacccagagggctgagaaaacaggagctagaggttctggtcccaactctgccagttacttgctgggtggctgtgatcaagtcacttcctactcaatcaaagagtcatctctacaagaaatgactgagtgacacgtgcaccactgcccaaccctgtgatccaggacttcccggccttagcctgacgggcttcccagctcttccagtgccttccctgctcaattaaatcaacttggctccccgttcccctgagttacctcccctgtggaatgacctgttgttttagatccaggcctctcctcctgtagttagcagggaaaaccaaggcaaggaaaagtaagggcagctgaagcaagggctggtagctgagctggggggcccatgtccagctcttgtccctgggccccttgatctggaatggggaggcgaggtccaaagaaggcagtgactcacttcccccttcccttatctaccattaccagaaaaatccttgacatcaggccactaatcgggtccctgtcccatgttctggacccttatctaccccgtcctgccccattcccgcttcctcagccactttcccagtaagctgactggcagcctcatactctcccaggctcctggcttcttcccagcaacctgtgacagagcggcaggggaaaggcagagggaaagcggagtgaggggccgcctgtgtgtggaagacctgggtcttgggccacaccctgcccctggctctgccctagcagatattccctggagtgctgctgcctggtgaggcttctgataccctcttccctctctctggctcttggcttagatttgtgacacagactatatccagtacccaaactactgttccttcaaaagccagcagtgtctgatgagaaaccgcaatcggaaggtgagcacccctgccctgcccctccttctcccagcaccccctcaatcagtcaccataactggtctattctgaggccccctctgcgagcagctaggatgtggaaagcggttcctgcttgcatctctggggcagaggcctccaccagcaggctctcctccattcctccagtcctggcggaagcaaggccctcctaggcagctggtggataacagaggagggtcctaagagcaccacaggaagaacccttggctgggccaggacttggacgttgaggtctcggtctgtctcctcttcttactcaccaagtagcctgggatgaggcacttccccctctgagcctcagccgcctgtttctgcatgaaaggggttgggctgcttgatgtctcctctggctttaaaaacccacatttgagtttcctccttccctctactgccctgtgcccatgcctgcccacctctcgttcttttgggcttctgacacctcccctcctccccactcctggcacctggctctgtgatacagaccgtctgcactgaatctgtgtgtaggtgtcccgcatgagatgtctgcagaatgagacttacagtgcgctgagccctggcaaaagtgaggacgttgtgcttcgatggagccaggagttcagcaccttgactctaggccagttcggatgagctggcgtctattctgcccacaccccagcccaacctgcccacgttctctattgttttgagaccccattgctttcaggctgccccttctgggtctgttactcggcccctactcacatttccttgggttggagcaacagtcccagagagggccayggtgggagctgcgccctccttaaaagatgactttacataaaatgttgatcttcagcctgtgtggcctgttctggtgtgatccccatcctcagcactgctaccctgccccgtggcagtcagtccccaacccctggttttatggatccacctgccggtgagagaatctcatgggaatggtgctcagggaagcagccatctgccaggagaagcagaagacctgagaacccagggaggtgaactgaggaaggccaagaaggctggggccctagggatgatgtgggcatgtgggcacctgtcttcatttctgaagccctaagccccgtgatgtcagatgcgagtgtagtattgttcctctgtaggataaaggccaaagcctgatgagatcttttccaaagggaccaatcctggggtatagggagtgtgcaccttgcacttaatcaggaagggaaaaaccaggaactatagcctagatcaggaaaccttggggttgtttttgttgttgttgttttgtgtttgagacagggtctcgctctgtcacccaggctggagtgcagtggcatgatcaccacccactgcagtcttgacctcctgggctccagccacactcctacctcagcctctcaggtccctgtgaccacaggaatgtgccactacgcctggctaatttttaaatttttttgtagagatggggtccctccatgttgcccaggttggtctcgaactcctgggctcaagcaattttcccacctcggcctcccaaagtgctgggattacaggaaggaaacccttggtgtacaggaatttgccagatgatctggatgtttaagtggttgcatcttaacaacctacattgaggtatgactccagcattggcctttattattattattattattagtgagacggagtcttgttctgttgcctgggctagagtgcagtggcactatcttggctcactgcaacctccgcctcctgggttcacgtgattctcttgcctcagcctcctaagtagctgggattacaggcgcacaccaccatgcccggctaattttttgtgtatttttagtagagaaggggtttcactatgttggccagactggtcttgaactcctgacctcgtgatctgcccgcctcggcctcccaaagtgttgggattacaggtgtgatccaccgtgcctggctcagcattggcctttaataagttgacatatcccaaagtatgttccagggacactgtagagtctctctcccttctataggttcgcagtaattaacagcattttgttaaagcttgcttactatgacagttcaaacatgcacaaaaatagaaaagtataatgcactgtcatgtacccttcacccagtttccatgatcaacacaaggcctatcatctgacagcatgttaaggccctccggagcgcggtaatagagaaacctgtttaacctagtgcttcccaaactcatttcaccacaatcccttttccacctaccaccaaaaaacttgaacttgtttttatttattgagcatggacaacatgcccagccctgtgcccacagggccacttgtctctgtgttgtctggcccgaggacacaagacaacgggctgaggagaaacagacctaagcaaagaggaaccatccagcctagtgactgctcgatgcgggagccaagtgtgctcagtgggaggcaggacctagcagagcactgtcatgaagagggccccgggcagggtggggcacaagccacgagtggcatggactaagccacgagtagcatggactaaaccacctggcagacctaggaaaggaagacagacacccagggggaaccggtgaggacagcgagaggctggtgggttagtcatctggcatcagacggtgggtgtgccaggaagagttcccagacacagcaggaatatctgaacgatgggtgggggcagttcctagtcggggctggattaagtatccttagctgctggggtttcttctctggccagtccgtgaaggcctctgagggcaatgcttcctcttcactctctccttggcccgtgtggggttgggtgagtgcactgagctgggagggatgggctgagatctgctgaggtgggtgtgtcccctcccgccccgggagcaggtcctaccagcccagcccagcccagcccagcccagagcaggcagcggaagccagcttggggcagcgcagagcaacacggagcacaggtatgggggtgtcacgaattgaactgcacagggagcacaaggggagcacccccctgtagaaatgggagatttgggtgggggacagagaagagggtgggcatgggccctggaaaacccttctgaacagagtaaaaagccgaaaggagctgcctcaaatagacagatcttttcagatggcgctggacaaacagctaacatgcctgctacasctcgggagtgctcctctttgatgcttgaagcccccactctggggcatctcgcagaggctgtgtcctccccctccccctctaggcccccactgtggaactgagccttgggcctcccagggagggccctctggggactgtttacacactttttccactcgcagttaaacctcaacccctacaccacacatcccccagggccaggcagatgacaatgagctgatctaatcaaacttgctaatgggttgactggcagagatgtgttctcagtgttatccttcccaactagccaaggtgtactgtaatggggtcttcaggaagtgctgccttaacccaaaaggtgcatctatataaggggattagactgatggtctttgatgtccctatggctctgatagatggtggcttcaggggatggaattttggaggtgggggacatattcggaggtcagcagggctttatgataccttcacatcacaccatgaggatggggcctacctcttccctgtggttgtggggcccccatgacaagaaggggacctccaccagattgtatctccagaactactcctttttttctctcttccttccttcctttcttttttttttttttgagacagagtctccctttgtcacccaggctggagtgcagtggcacgctctcagctcactgcaacctccgcctcctgggttcaagcaattctctgcctcagcctcctgagtagctgggattataggtacgcaccaccatgcccggctaatttttgcatttttagtagagacagggttttaccatcttggccaggctggtcttgaactcctgacctcatgatccacctgcctcggcctcccaaagtgctgggattacaggcataagccacggtgcccagccattttttttttcaagacaggatctcactctgttgcccaggctggagtgcagtggcatgaacatggctcactgcagcctcaaactcctgggttcaagcaatcctcccacttcagcctcccgagtacctgggactacaggcaggcaccaccatgcccggctaatttgtttttttttttgagatggggtctcgctctgtcgtctaggctaaagtgcagtggcatgatctagactcactgcaaactccgcctcctgggttcaagctattatcctgcctcagcctccagaatagctggaaatataggcttgagccaccacaaccagctactttttgtattttttttgggtgtgtgtgtgtttgtgtagagacagggtttcaccatgttgcccaggctggtcttgaactcgcgctaaagtgatccattcgcctctgcctcccaaagtgctgggattacaggcgcgagtcacacactcggcctctgttagttttttgaaatttttttgtagagcggacgtggtggctcacacctgtaatcccagcactttgggaggccaaggcgggcagatcacaaggtcaagagatcgagaccatcccaggcaacatggtgaaacccccgtctctactgaaaagacaaaaattagttgggcacggtggcacgcacctatagtcccagctgctcgggaggctgaggcaggagaatcccttgaacccgggaggcggaggttgcagtgagctgagatcacaccactgcactcaagcctggcaacagagcgagactctatctcaaaaaaaaaatattttttgtagagatggggtcccactatgctgcccaggctggcagaaatcctccttttagggtgagctaaagttgtagacccagtgggacatggaggcagggattgaggtgagacagaaacttactcacatgcagtatgtacaggactcaccacccagccactcagaggcactagagcccaactccatctgtctgatgccatctgctctccctactctgctgcccccagtgcataccccaggacatacctactgacagagatcttttatgcccaggggcattttaaaaagcccaggagaatggccgggcacagtggctcacgcctgtaatcccagcactttgggaggctgaggagggcagatcacctgaggtcaggcattcaagaccagcctggccaacacagtgaaaacccatctctactaaaaatacaaaaattagccaggcgtggtggcgggcgcctgtagtctcagctactcgggagactgaggcaggagaattgcgtgaacccgggaggcggaggttgcagtgagctgagattgcaccactgtactccagcctaggtaacacagcaagcgagactccatctcagaaaaaaaaaaaacaaaacccaggagaaggarccggcaagagcagtgagggctgaagccagtgcactctaaagtcaggtgaggtcagcaaagcccacaggctctggtggatttccctgaggaagcaggacctgccaggctacaagcaagggtcagatgcacacagaccacctcaggacacaggtcagggggctgggcctgcctccgtggcttctcttgggactgactttcttgcttttccagctctcgaaagcagggtaaagggagaggcacaatggcaaggtgatatccgcacatcagggaaactagttattgagctgtagaccacctttgctttctgccttttcccagacaaatgtcaggagggatgaggtcagagtactcagggagggagaagccagggccgaggatgatgctggaaatgcaggaaaagacaggcttcagcagagaagggtggggaaaggcaggagcaggaattctggctggagaagcaggcaggcctgggccagggaggagggaagacacgacctgacacccgggatccgtgccagagactcctctctgaggaagaatgtggcccctgggcagaaggaggcctccccgccyaccctggggactttgtactgtctccaaaccttgaggatgaggattcatcctcctgttccatttagtcttccatctcatccctgcccctcaggaccaggataagcggaagaaaaggattcatttgtgccctcaaaacagctctgggacagagcttttcacaaaggctttggrctgagctaagcttctgctggaggctcagcacagctggggtctgtttggagggcctggatacagagatactgagtcttcatgatgaagcctgtctgtggggaaagggtgcatcctcccagcgctgcctgaacacagaagcagaggaagtaggcttcgctaattcagcgagtgggttagagtacatactaaagagggacttcctgtgtcggggctgagacactgatgggccacgagactctaaaatgagggtggggctattccagagctgattctcaggggcaaggaggatggggagatgtaagaaccttcttttcagacctctgaccctaggaattggagtcaggggacccaggatgtgaattatttgaaagaggaggcaggccgggtccagtggctcacgcctgtaattccagcactttgggtggccgaggcaggcagatcacaaggtcaggagttcaagaccagtctggccaatatagtgaaaccccgtctctacgaaaaatacaaaaaattagccgggtgtggtggtgtgcgcctgtaatcccagctactcagggggctgaggcaggagaatcgcgtgaatccgggaggcagargttgcagtgagctgagattgcaccgttgcactccagctcaggcgacagtgcgagactccgtctcaaaaacaaaagaaaaaaaaacggaaagaaagaaaggaggcaaaagacagagcaaggcatgtggtgtttgcggggaggtgggcaacacaggaagggtatgggggaggaactgggcaaagaggaggcattcccctgcccctgcccttctcattgttcccagccccctggtcctttctcttcagctcccctcaacgtcatttgcccaagaggctggataccagggcagggtgtgtggaggagagtgagggaatgatcatgattgcacctcctgctcacttttacactcttgttctcacttcctgcctctggcataaaatagccctgcccctctggcttatctcagcaaagagcagtgcccagcccagctcagagggcaaatgggacagatcccagaggccctgaggaggtaagtaacctggcccccggatgtgtacatgggaagctgaaggacggagacccagggagaaggaaggtggctgcacacattctggtgtgtgagcggtgttggggtgggtgatatagaaggagcagtcccggaccctctgtgtgtgtcgtggtcactttgctcctcagtgccttggggttgagatctcccatgcttgtgaagctgcctggttctgtctgtgtaaggatactgtccctaaggcagggccttctttctcttcctccccagcccagttgtctatgcacatacgtgtttattacaggatgtgtatagacactgagttctatgttactaggggtcttgtgtgcacatctcttagcgtgtgtgtatatgtgtctgtgcacacacgtgtaatgagtggtatacttacctgacatcagtgtgtgccgacgttcttcagcctatgggggcctccatgtccctccttcctggtgttccttcttttctggggcagctgccatttctttgattcctgcatctctcctacagcctgacctcttcttcaaggcaggattgggggagagggtctgggctgcccctccccaacacctagattccctccttccacatcctgttagcctcctttttggcagttttttccatcttcgccatctggcctggcactgtgcccattcagctcctgaagggagccccagggctcgggaagcagaagtgtgggatggggaccaggccaggggcctggcagctctcagtgctcagcttgggccgttctgtgtgactgtcagaaagaggcggctttttgaccaccaggatcctttataaagatgggctggggccaggtgctgtggctcatgcctataatctcagcactttgggaggccgagccgggtggatcaactcaggtcaggagttcaataccagcctgaccaatatggtgaaacctgtctctactaaaaatacaaaaattagccaggcatggtggcgtgcacctgtagtcccagctactcaggaggctgagacaagagaattgcttgaacctgggaggaaaaggttgcagtgagctgagactgtaccactgcactccagcctgggcaacggggagactccgtctcaaaaaaaaaaaaaaaaaaaaaaaaaaaaaagatgggctgggtgcagtggttcactcttgtaattccagcacccagcactttgggaagccgaggtctgcagatcacttgaggtcaggagaccagcctagcctgrccaacatggtgaaaccccatttctactgaaaacacaaaaaattaggcaggtgtggtggtgcgagctatgatcccagctacttgggtggctgaggcacgagaattgcttgaacccaggaggcggaggttgcagtgagccaagattgtgatactgcactccagcctccaaacgaagtgagactgtatccaaaaaaaaaagaaacccaagaacttctcccctttggaatagagtaacaagagagcatcgccatttcctttgctaaaaaattcctagctatacctttacatttatttatttatgttttttgagacagagtttcactcttgtcacccaggctggagtgcagtggcgcgatctcagctcactgcaacttccgcctcctgggttcaagggattctcctgcctcagcctcccgagtagctgggattacagatgccgccaccatgcctggctaatttttgtatttttagtagagatggggttttcactatgttgaccaggctggttttgaatgcctgacctcaggtgatccgcccgcctcagcctcccaaagtgctgggattacaggtgtgagccatcacttcgcctaactttacctttaagtagccgctcaactaataatcttggtctatttaacattttaatttttttttttttttgacggagtctcactctgccatctaggctggagtgcagtggcgcaatctcggctcactgcaacctctgcctcccgggttcaagcgattctcctgcctcagcctcccgagtagctgggattacaggcaggtgccaccaagctcggctaatattttgtatttttagtagagatgggctttcaccatgttagctaggatggtcttggtctcctgacctcatgatgcacccaccttggcctcccaaagtgctgggattacaggtgtaagccaccgcactcggcccttttttttttttttttgagacagagtctcgctctgttggccaggctggagtgcagtggcacgatctcggctcactgcaacctccgtctcccgggctcaagcaattctcctgcctcagcttcccgagtagctgggattacaggcgtgtgccaccacccctggctaatttttgtattttcagtagagatgaggtttcaccatgttggccaggctggtctcgaactcctgacctcaggtaatccgcccacctcggcctcccaaagtgctgggattacaggcgtgagccaccgtgcccggtacattgtacctttttcaacagaaagacttgagatcagccaggcacagtgnnnnnnnnnnnnnnnnnnnnnnnnnnnnnnnnnnnnnnnnnnnnnnnnnnnnnnnnnnnnnnnnnnnnnnnnnnnnnnnnnnnnnnnnnnnnnnnnnnnnnnnnnnnnnnnnnnnnnnnnnnnnnnnnnnnnnnnnnnnnnnnnnnnnnnnnnnnnnnnnactcaggcggattacctgaggtcaggagttcgagaccagcctggccaacatagtgaaacccagtcttctctactaaaaatacagaaattggccgggcatggtggttcacgcctgtaatcccagcattttttggaggctgaggcgggcagatcacctgaggttgggagttcgagaccagcctgaccaacatggagaaaccccatctctactaaaaatacaaaattagctgggcgtggtggcacatgcctgtaatcccagctactaaggaggctgaggcaggagaatcgcttgaacctgggaggcagaggttgcggtgagcggagatcgtgccattgcactccagtctgggcaacaaaagtgaaactccatctcaaaaaaaaaaaaaaaaaagaaattagctgggcgtggtggtgagcgcctgtaatctcagctattcaggaggctgaagcaggagaatcacttgaacccgggaggcggaggttgcagtgagccgagattctgccacttcactgcagcctgggtgacagagcatgcgaaactccatctcaaaaaagaaaaggaaggaaggaaggaaggaaagaaagaaagacagacttgaggttctttgaaaatcatccatccactcattcagtgtctagtatatgctttctaattggaaggatctactggttctccaagtaatggttaagaatgatcaagtgggcctggcgcggtggctcacgcctgtaatcccagctctttgagaggccaaggcgggcagatcacgaggtcaggagatagagaccatcctggctaatacagtgaaaccccagctctactaaaaatacaaaaaattagccgggtgaggtggcaggtgcctgtagtcccagctactcgggaggctgaggcaggagaatggcgtgaacccgggaggcagagcttgcagtgagcccagattgagccactgcactccagcccggacgacagagcaagactctgtctcaaaaaaaaaaagaaaaaagaaaaagaaaagaatgatcaagtgatactgtaatcatagtgtaaactgttattgaaatcttgtttgcaagctgtttccaaacaggtcttttaagggaagtggtcttttactgagttatacatttggacaagattgatacaagagctattatcacaggattagagcgtgggcgggggtagttgggggcgggatgggtgtaggaggtggggagggtggatttcctgttaagcagccaatgagtatcgctcaggacctgctaaatgcagagagtgaaatgtgtctgcaaggtgcgctcccaccctaggagcttaccatctagttggggaaatagaacaaatatacataaaacgattgaggggctcaaaacagcaaactaagtgcttacgtatgcacttaagggggaattttaaggaggtttatttatttttttgagatggagtttcgcttttgtcactcaagctggagtgcagtggcacgatctctgctcactgcaacctccgccccttgggttcaagcaattctcctgcctcagcctcccgagtagttgggattacaggcacctgccacctcgcccggctaattgtttgtatttttagtagagacgaggtttcaccatgttggccaggctggtctcgaactcctggcctcgtgatacgcctgcctcggcctcccaaagtgctgggattacaggcgtgagccaccattcccggtctatttacttatttttatttagacggagtctcactctgttgcccaaactgtagtgcagtggcatgatcttcgttcactgcaacctccgcctcttgggttcaagtgattcaaggaggcatatttatgtgtatgtgtgaaagatgagtttatgtcaccacttttggaagtggttatttttaataacccacttcaaataacccactttatacatttcagttggacaatgaggaagtgaaataatgtatctatgttagatattatgtatagaaattaaaatatggtgatgatcagtaaatgatacctattatttttaacatttacagaggtaggtgctgagaatacacaaagatgaataagccatggtccacagcccctccctctaagagttcacagtctaatgggaggggcagaccaggaacagctgactaccatgcatggggagagctctgataaacctgcgcactgttgcggaggcacaagtgagggtaccacatccgccttgtgttgcgggggcggttagggaaggctttgcagagtcctgagaaaatactaggcttgccagttggagaacgggaggcagggcattccaagttgaagaaacaccacatacaaaggcagagtcctgaaaacataaggtatgtccacaattagtattagtttggtgtgaatggagcaaaggagcatggagcaggggagtgtatcagaaatgagcctggttttacttgcttttcagcatgtttaagtctcatttggtattattttcattgttgagactggtattttgcagaggaagtatttctttattccctttaactgttttactatatctcttacaagtctcaaactgctgatggtggtggttggaaggagaacaaaaccaaatacaagaaaaacttgtggccaggtacagtggctcatgcctgtaatcctaggacttacagagcccagggcaaaaggattgcttgagcctgagtttaagaccagcctgggcaacacagtcagaccccgtttctatgaaaaaattttttctttttttgagatggagtcttgctctgttgcccaggctggagtgcagtggcgcgatcttagctcactgcaacctctgtctgcctcctgggttcaagcgattctcctgactcagtctcccgggtagctgggattacaggcacctgccactatgcctggctatttttttgtatttttagtagagacgaggtttcaccatgttggctaggctggtttcgagctcctgacctcaagtgatccacccacctcagcctcccaaagtgctaggattacaggcgtgagccactgcccctggccatctacaaaaaatttaaaaattagccagggatggtggcacacgcctgtaggtccaactactcagagactgaggtaagaggatcacttgaatctgggagttcaggactgcagtgggccaagatcgagccactgctttccagcctggaccacggagtgagaccctgtctcaaaaaaaacaaaaaacaaaaaacaaacaaaaaacttgttatagccagatttatgacttattttcttgcaacaatttaaacagttccttttttttttttttgagacggagtctcactgtcgcccaggctggaatgcagtggcgtgaactcggctcagtgcaaattctgcctcccgggttcccgccagtctcctgtctcagcctcctgagtaactgggactacaggcgcccaccaccacgctcagctaaatttttttgtattttcagtagagacgaggtttcaccatgttagccaggatggtctcgatctcctcaccttgtgatccgcccgccttggcctcctaaagtgctgggattacaggcatgagccaccgcgcccggccctctttttttttttttttgagacggagtctctgttgcccaggctggcgtgcagtggctcaatctcggctcactgcaagctccgcctcccgggttcatgccattctcctgcctcagcctcctgagtagctgggactacaggcgcctgccaccacgcccggctaattttttgcatttttaaaagagacgagatttcaccgtgttagccaggatggtctcaatctcctgacctcgtgatccgcctgcctcggcctcccaaagtgctgggattaccagcgtgaaccaccacgcccggcctaaacagttccttttgaaagtaataagctcggtgtcttgggataattgctcagggtctcagacaacttctctccctaagatgacatctagacacccatgttcacagtggcattattcacaatagccaaaaggtggaaagaatccaagtattcactgacagatgaatggatgagcaaaacattatacaatgaaatacattattcagctataaaaatgaaattccaggccaggtgcggtggctcacatctgtaatcccagcactttgggaggccgagccgggtggatcacctgaggtcaggagatcgagaccagcctgaccaacagggagaaacctcgtctctactaaaaatacaaaattagccaggcgtggtggcgcatgcctgtaatcccagctacttgggaggctgaggcaggagaatcrcttgaaccctggaagcagaggttgcggtgagccgagatcgtgccattgcactccagcctgcgcaacaagagcgaaactaggtctcaaagaaaaaaacggaaaagaaaaaaaaagaaattcctttacatactacaacatgaatagatcttggaaacattatgctaagtgaaataaaccagacacaaaaggacaaatattgtatgattccactcatatgaggtatctagaataggcaaattcattgagacagaaagtagactagaaccagaagctgaatggggtgcggtgggtagtactgcttaatgactgcagagttgttgcttggttgatgaaaaagttctatttctggaaacagagagtggtgacggttaagcaacactgtcttggtcttttttgttgttgttgttgtttttgagacggactctcactctgtctcccaggccggagtgcgatggattagacctgctaggggagcacttggcaaaactcaacccacagggccttcccctgcctagcaagactgtgctgtcaaatttattcacatgtggctctggtcaagactagcatgcaatcagcctatgagggcattattatattattattcccattttacagatgaagaaactgagaagtcaaaccattaagctgaacccagtttgctttgaccacaaatccagccctcacaggcgcagtgatgcatgtgatgcgtaaggctgggatgttgttctgtatttgggagttttgtttgcttgtttgcttgtctgacatggagtctcactctgtcacccaggctggagtgcagtggcgtgatctcggctcactgcaacctccgcctcccgggttcaaggactctcctgctgcagcctcccatgtactcaaagagtttgacctttattctttggataatgaggagctagcctagcacctggtccaaggaggtgctccataagaccacctattgatttgtgcttattatctgtctccctccaatggaatgtaaaggaggtgggggcaaagactttttgctttgttccctgctgtgaacatgcctggaactttctatgagctcagtaagcaaggaaagaaggaaggaagagatcttgagatagtaacagcaacctaagcgttttacacacgtcatcttaatctccaaacctcatgaattctctctctctctctctcattttttgagacagagtctcgctctgtcacccaggctggagtgcagtggcgtgatctcgactcattgcaacctctgcctcctggattcaatcaattctcatgccttagcctactgaggagctgggattacaagtgcacgccaccatacccggctaatctttgtatttttagtagaggcaagattttgtcatgttggccaggttggtcttcaactcctggcctcaagtaatccacccacatcagcctcccaaagtgctgagatcacaggcatgaggtaccatgcagccgcctttttttttttttgagatggagtctcgttttgttacccaggctggagggcagtggtacgatgtcagctcactgcaacctccgcctcctgggttcaagtgattctcctgtgtgagcctcctgagtagctgggactacaggtgcatgccaccacatctggctaatttttgtatttttagtagagacagggttttgccaggttggccaggctgatctcgaactcctgacctcaggtgatctgcccgcctcagtctcccaaagtgctggattacaggtgtgggccactacgccggccctggccctctttctttcttttttgagatgggctcactctgtcacccaggcaggagtgcagtggtgggcttgaggctcactgcactgcagcctccacctccctggagtcaagtgattctctcacctcagcctcacaagtagctgggactacgggcatgtgccacaatgcctggctaattttttaattttttaatattttttattttatttttttttgagacagagtcttgctctgtcacccaggccggagtgcaatggtgtgatctcggctcactgcaacctctgctcaagcaattctccctgccttagcctcctgagtagctgggattacaggcgcctgccaccacgcccggctaatttttttttttttttagtagagacaggattttgccatgttggccaggatggtctcaacctcctgacctcaggtgatccgcccacctcagcctcccaaagtgctcggattacagatgtgagccaccacgcccagccttatttttattttttattttattttatttatttattttgagatggagtttcactcttgttgcccaggctggagtgcaatggcgcgatcttggctcactgcaaactccaccccccaggttcaagcaattctcctgtctcagccccctgagtagctgggattacaggcgcccgcccctatgccaggctaatttttggtattttttttagtagagatggggtttcaccatgttggccaagctggtctcgaactcctgacctcaggtgatccacctgcctcggcctcccaaagtgctgggattacaggcgtgagccaccgcgcctggctatttttattttttgagacagagtttcacttttgttgtccaggctggagtgcaatggcacagtctcagctcactgcaacctctgcctcctggtttcaagcgattctcctgtctcagcctcccgagtagctgggattacaggcgtgcaccaccacgcccagctaatttttgtatttttagtagagatggggtttcaccatattggacaggttggtctcgaactcctgacctcaggtaatccacccgcctcggcctcccaaaatgctgggattacaggtgtgagccactgcacctggccctgtatttttttgtagagatggggtttcgccgtgttgcccaggctggtccccaactcctaggttcaagcaattggtctgccttggcctcccaaagtgccaggattacaggtgtaagccattgcacccagccaagattaatttttttgaagtcacacaactaggcaagttagcaaaaccaagatttaaacctaggcatccgagtccctgccttcaaacctgggtgtttaacactatactatatagtcctgccgtaggaacctattctagcccaatggcagacttgaggctgagaaaagattcagaaggcctgccagtggagctaaacatttgtgtgtgcagccctgtctctgtataacttccggcttgccttcctattccaggtctctgctgctgatgaagctgtgaccaaacgcacccaacccttggcagccatctgtccctgcagccatagcccacattcccatgacctccctctgcttgttttgggaccatgtctgtacagcctctaggccccagccccggaggtgaatgccatgccatgattctggtgtgctccatggcatccccagcctagctcccaatcccactttggcacgatgttagccaacagctcctcaaccaacagttctgttctcccgtgtcctgactaccgacctacccaccgcctgcacttggtggtctacagcttggtgctggctgccgggctccccctcaacgcgctagccctctgggtcttcctgcgcgcgctgcgcgtgcactcggtggtgagcgtgtacatgtgtaacctggcggccagcgacctgctcttcaccctctcgctgcccgttcgtctctcctactacgcactgcaccactggcccttccccgacctcctgtgccagacgacgggcgccatcttccagatgaacatgtacggcagctgcatcttcctgatgctcatcaacgtggaccgctacgccgccatcgtgcacccgctgcgactgcgccacctgcggcggccccgcgtggcgcggctgctctgcctgggcgtgtgggcgctcatcctggtgtttgcygtgcccgccgcccgcgtgcacaggccctcgcgttgccgctaccgggacctcgaggtgcgcctatgcttcgagagcttcagcgacgagctgtggaaaggcaggctgctgcccctcgtgctgctggccgaggcgctgggcttcctgctgcccctggcggcggtggtctactcgtcgggccgagtcttctggacgctggcgcgccccgacgccacgcagagccagcggcggcggaagaccgtgcgcctcctgctggctaacctcgtcatcttcctgctgtgcttcgtgccctacaacagcacgctggcggtctacgggctgctgcggagcaagctggtggcggccagcgtgcctgcccgcgatcgcgtgcgcggggtgctgatggtgatggtgctgctggccggcgccaactgcgtgctggacccgctggtgtactactttagcgccgagggcttccgcaacaccctgcgcggcctgggcactccgcaccgggccaggacctcggccaccaacgggacgcgggcggcgctcgcgcaatccgaaaggtccgccgtcaccaccgacgccaccaggccggatgccgccagtcaggggctgctccgaccctccgactcccactctctgtcttccttcacacagtgtccccaggattccgccctctgaacacacatgccattgcgctgtccgtgcccgactcccaacgcctctcgttctgggaggcttacagggtgtacacacaagaaggtgggctgggcacttggacctttgggtggcaattccagcttagcaacgcagaagagtacaaagtgtggaagccagggcccagggaaggcagtgctgctggaaatggcttctttaaactgtgagcacgcagagcaccccttctccagcggtgggaagtgatgcagagagcccacccgtgcagagggcagaagaggacgaaatgcctttgggtgggcagggcattaaactgctaaaagctggttagatggaacagaaaatgggcattctggatctaaaccgccacaggggcctgagagctgaagagcaccaggtttggtggacaaagctactgagatgcctgttcatctgctgacttctgtctaggctcatggatgccaccccctttcatttcggcctaggcttcccctgctcaccactgaggcctaatacaagagttcctatggacagaactacattctttctcgcatagtgacttgtgacaatttagacttggcatccagcatgggatagttggggcaaggcaaaactaacttagagtttccccctcaacaacatccaagtccaaaccctttttaggttatcctttcttccatcacatccccttttccaggcctcctccattttaggtccttaatattctttctttttctctctctctcgtttytctcttctctctcctctcctctctcttctcctcttctctctctctccctctctctcctttgtccagagtaaggataaaattctttctactaaagcactggttctcaaactttttggtctcagaccccactcttagaaattgaggatctcaaagagctttgcttatattttgttcttttgatacttaccatactagaaattaaagcgaatacatttttaaaataaatacacatgcacacattacattagccatgggagcaataatgtcaccacacacacttcatgaagcctctggaaaactctacagtatacttgtgagagaatgagagtgaaagggacaaataacatctgtgtagcagtattatgaaaatagcttgacctcgtggacttcctcagagggttggtccctggatcacactttgagaaccatacttgtcctgaagtattggagttcatgtctaacttcttcccagggcattatgtacagtgctttttattactgtggggagagggcagtgctaaataaattaatcactactgatagtcttcatggctcagggttttcctgcggccctaggagtagtacataaaatggaacactaccctgggcatatcagagcagcagccctggggcagggatggagactggggggtggaactagtcatacactcaggcagaggggatggggcttctctgggggagggaaaagggaactgtgccacagccaggagagaaaagtttatggggaagttaagagtgagatgggaggacaggaataggctgtccattctcagcacgctggaagcaagggaaatgggccacctactagtccttccctctttttttttttttgttgagacagggtctcgcactgtcacctgggctggagtgcaatggcgcgatctcagcacactgcaacctctgcctcccgggttcataggattctcctgcctcagcctcccaagtagctgggattacaggtgcacaccaccacacccggctaattttttgtatttttagtagtgatagggtttcactatgttggccagactggtctcgaactcctgacctcaggtgaatctgcctgcgtcccaaagtgctgggattacaggcatgagccattgtgcccggctattccttccctcttcacccaagttgggggctcggaggggctgcagagttggcacttgtggacatcttcagaccctggcattactgaaggagctgttgccctgtgtgcgtcctatagcatttctgtccctatgtctcaatactgtatttttatctgtgtgtgcacgcactctgtgtgtgtgtgtgagagaatgtgtgtgtgtgtgtgtgtgagagagagagagagagtgtgtgtgtgtgtgtgtgtgtgtgtgtgtgtcagggttctccgtttgtgtctgttttagtccagggtagccttttgtgtgtgcctttatgccaagtgctccagatggtgatttacaggggtaaaatgacccctggtggccaaatcagagaactgacccagattcctcagggatagccatgaaatctgggcctttctccatctgggtggagattggagcctggagcccggcacttacctccagccgctctggaagaggcctggtgattagcacctgctccatctctcttcatcttcagggttcaagacctgtgcccttcctgtcctgagagcactggcagcgccaaacctcgtagtccaaaatcttagcactttgccctattcaaacagaatcaaacacaatttttaaagattacttgagtacttttataggcaggtacgtgagttccaaagtaattacaactcacggcatgtatcacttttcaacatactatataatttatttattctaatttttatagtttatcatctccgccaccccgtcctatatcctaggtagaatgtaagttctgtgggggcatggatttttgcttgattctctgatgatccccagcatctaaaacagtgcctggcacagagaaagtgctcagtaaatatttgttgaatgaatgaacagtcagatcttgctgtgaagtagtttacaatctagtgagaaccatagaacaagtaaacaaaaactataatgccaggcagaaaacacaagaatgcagggtaaggtgctggcagttggtttagtgggcaatgggaagcccacggaggctcctgagtgaggttttgctcacactgacaaactgtgtggaataaactgtaggaaaatgatggggggggaaagtctaaagaaacgaaagactggtcagggggccattacaatagcccaggacaagtgtggccatggcctgtggaagagctagatggcaatacattgtctctgatgtgaaatctctggtgtcaaagccctggtggactatttccccccattcagatatccaaaggctttccatcaagagaacagagaggcaagaatagattaggccattttcatagggttccccaagactaagagagcaatatgaagtccagagccctcaccccatgccctgaagctgctctatttaaggtctatgaaaatccaaagatagagaaggggaaaatcttagacagacgggaatgagcattagcagtttttgttgttgttgttgtttttgaaatggagtttcactcttgttgcccagactggagtgcagttggtggtctctgctcactgcaacctccgcctcccaggttccagctattctcctgcctcagcctcctgagtagctgggattacaggcgcccgccaccatgcccggctaatttttgtatttttagtagagacagggtttcaccatgttgaccaggctggtcttgaactcctgatctcaggtgatccacccacctcggcctcccaaagtgctgggattacaggcgtgagccactgcacccggccttttagcaggtttaaaaaatactcttctgtatgccaagatttcaagttagcgcttaagatgcattatcttctttattatattaaataatataatctgagttggagatgatgttcatcccttttacagatgaaacaccctggagaatctgaggtcttaaggtcacacaactagaaagtggctcagtctgtaatttggctcccaaactcctgctttttgcagtatacctctccttcctgggactttctttcctgttacataccaccccgggtttccttccttctcctcccctcctcatgtagccacctctttcaactgcctggcttgccttgaatctgctgcatcatcttggtcctcctcttcccagttcttcctccatgcccctaatccacttgccctacagcacacccgccccttccctctccgtttgtctcagccccctgtttattgaacaccatgtggctgtaggggttggggaggttgagagctggctcactcaaggttctaattgtgttgggccctaaaatacaccacatcgagggcccacacacaggcagaatgccttaagacttcaggcagttggccatgactcccctcccccagcctgtgatgtaccctacatctccaaggcagcactcctgattgtgtacactgagcagggaccatcccttggttcacccttcctcaaagtctgtctcctcggtaggatggtccctccacatggtgagaggagctgggaagagtaacaatcattattattatttttttttttttgagatcgagtcttgctctgtcacccaggctggagtgcagtggcacgatctcggctcactgcaacttctgcctcccaagttcaagtgattctcctgcctcagcctcccgagtagctgggactacaggcacgtgccaccacacccagctgattgtttttatttttagtacagacagggtttcaccaggttagccaggatggtctccgtctcctgacctcatgatccgcccacctcggcctcccaaaatgctgggattacaggcatgagccaccgctcctggccttaatttttttttttttttttttttttgagacaaggtcttgctctgtcatccatgctggagtgcagtggtgccatctcggctcactgcaacctccccctcccagattcaagtgattctcctgcctcagcctccttagtagctggaattacaggcgtgcgtcaccacgcccagctaattttcgtatttttagtagagacggggttttaccatgttggccatgctggttttgaactcctggcctcatgtgatgtgcctgactctgcctcccagagtgctgggattacaggtgtgagctaccacacccggccacaatcattaatcttaaaacaaatttaggagagccagggcagaggtaagggatatcaaaggagggcagagattcttccttcttggtcctcaaccatcctgaagatggaattccctcgaggctgccacctggagtcccatggaagaaacggggaacggaaggttaatctcacacaggaaggccctggacaagttggggtaattctcaccatgttgtccttgccagaggagcacggaaagtcctggaaggtgaactttctcactcagggtttggggaatcccaaaggctccagaactttggaatcaaacaaatctgggcattaatttcaactctctcacttcttggcaatgtggcttcaacaaatttcttgacctctctgagcctctgttttctcccatttctctgtgaaatggggctcataatatccacttattgggttattgtgagggtcaaggagcccacctttgaaaggtactctagatgccccataagtgggagctccttctttccaacaagagcatggggaggcgaggccattgatcaactctgccagtgatgcccaaggggagtgtttcccgaagacctgaagggctctttcctcacccagacagagctctgccagcaatcagacgtaggaccacgggaggtggtgagcaaggcaggctgggcaggtttccacggtgctaggtcaagcaggcagtctttaggggcagcgactggcctgttgccctctgggggcactctctccccactaggcccatgtccatcccacagaccaaggaggaggtaggaaagtgcaagacagggggaagctggctggagaaccaagcaatggagaaagggcaagggaggaggctggaggggaagcgagggcccaggcaggcacggggtggggctgggagaggggcccagggcaggagggcgggagaaagcctgggagggaaagcgccgaccagggagggaggagggacagggagggaggcctgcggcgctgacacagcctcgatgtgtggaactggctggggtttggcccacaggtcaggcgtctggcagtattatgggatggagaggccttaggagacagggagagtattatgggctggaacagccttaggagactggggaatattatgggttggtgaggcccggctccaactggaggcgggaggaaggggtgcggggcgggaagggggggtggtggtggaagggagtattatgggctggaggcctcctgcgaccagaggcaagagtattatgggctggcaaggccttcggtggccagaggggggagcagcgggggatggcaccggctgcatgtgactgagggggggccaagttggggggggtggtgagtgggggtgggggagcttattatgggatagctctttgtacctactgcggggactgcttctccagaagatattatgggatgtcgtgtgtgggagggggagtggggctggggggattattatgggatggtggtgcagaatggggagggcctgaggagctcttctccagcccccccacctcctcaacccttactcgcctaccatcctttctaaggtcaccgtcctctctcagactccccaagaggaacacctgaaacccatctccctacacacacagactttgggcacctcaacccatcccgggcttctcccctaactagcagccacctccggggtgctgaggagaaaagtagcccctggcgaatggggagaaagccctaaagcagggtggtggtggccagtggatcacaccttccacctgcacgacggcctcctctgcaccctagccccttataccaccgtccttccccttctccctgcatcccacaaagtgggggccctggatctttctcccctcccccctcccctccatttcctctccagctccctccacagccgtaaccagtaaaacaggcggccagctattatgggatggctgctcccagcagctctgcagggagggggcg

SEQ ID NO: 6812 - DNA, 202814 bp, Homo sapiens
ttgtttgttgtggtgtctatagcaaagtttttctatcaattttcccccatcccatccccaccctggactcatttgagaagacttgagaaatgtcttaatactcacactgctgcatgtagctcttgcttatttactggtctgggaaacaggatgtgtttcctttttttaaaagccaattgacagattacacctaaatactcctccttttgtatcattcagccttttgttttagtttggtaagttttaagaaatttcagcagcaaagttgttattcagtgggcacgatggactccaaatgcctcaagttatgtatacctgtcccagatgtaaacttcattgtcctttgttggatgatattttaaatggatataaaataaattggtctaaagggctgccctccttgttgtgtttttaaattttagttaaaaactgctacagcttatgactttgtactttaagataattgtattgatcttttttcagattccttgtattttttaataaagtaatcttaaataaaactcagataggttaagtgttagaaattttaaacagcttacattgttagcgtaaagttatcttttcttttttcctaatcagagttcttgaccctttggttattgagtttaaaacttcaattgaaattcaatagtatttatttttkaaaaaaatcactaaactgtgcctaaagaacataactgccatattaatgttttggtttatatcctctatagtaatagaaaaacatttaatacttgtaatgctgatgtgttaatttgataccagttgagtagaatgtgatcaatccagtttacaatctatcatgagtattattaactaaaatctatgtgcttttcaataggaatcattcttctcttgctgtaacacttgaccttaacttttagaaagtgttcatttttaaactgcaactggaaaggttgaaaagttaggactcttgtatttgtgaactgtaatctgaagcagattatttaaagtgtagaaaaagaaacaagttcttcttttttgcaaaggtctgtgataccatatttcagctttgtgtaagtaatttgaatatccaaagggttgtgatgatcagttctgaatatgcaactgtccacttaataaggacaagtattccagtatctcttatgactgtagtcataaatgatgttggaatgtacattttgtgaaatagttggtatccctttactatgattaatttttgttattccaggaaatacttgtgaagccagccaattaataaagcactttagcatctgttcaggtagttttgaaaaccmacttttccccttcaggataagaacttccaggttacctaaaaatgcaataaaaatctttatagtctaagcttcttggcatataatttttcatcagggttttcttttattaattgagcacaatactgttttgatttaatttttttccctcaaaccacccagctccttacatagtttttaattatatagctatmtgaaagaggtggctaagacatttgctgcacacacttgaactaatgttgggtcagtagcttcgtgttactgccctgatcccagtgtaattcaggtggaaaggtatttttatctcacagggatatgtagctatgtattttactaattgtgaaacactggaaattaatgatgcagacaacttggtgtggtctttgaacagctctctgcagtatttttttttttcctgttaccataaattgtatttaagtgcttgctttccacttaagttgtactaatagaaccggtaactcccagccctccctgtttgacactccttagcttagattgatgtagttgtttttgttatccctataatgtgacttttatttttaagtcattgtgtactgcatttgtttgtcactagttgggcacgtgccaataatattctctccattccttatctgccatctctgttttgcctgatttctcttcaactgaataatggctttttgcatggaaaaaatagtttttactattagacgtgtaaagggaagagagagctaatgtattggactttgtgagcctacaaggaatattttggatccctccaataaataagggctatgtactatatgtactatatagagttatcatgtggtggaagatacttgcaagtcatagatttatgggcaggaggatttgttactscctatatctaggctgaatgtaaaatcccttatgttgtatcaatgggggtaaaaactatttttatttgcctatgatatacttggtttctaataaagtgccctaggctctagtgagaactgtctactttgaattgccatttactccctttcctcctttggccgatatgctcttggctagctttttataagttaatgtgtttccccaaaaagtttcactactttatattcatttgagtgtgatcctaaaacacctggatcaacagtacatctcatatgcaatctgcatcagctcctattctgtctggatgtctagaactgttggaagattttgacgtcttaagccctaggttttgctttgggaaataaggtttgaaatattgttcattgcattaagatttgtgtgtgtgtgctttgtaagcccagaaccaggttttggaaaatgcctgtactgtgaaagcaaattaggactctttctgagcctctttcattgtcagaaatagaatcactttccatcagcttccaggaaattgtgtatctggagtcgaagagatttgacatcaagaatccagatttttaaatgtaattgttttttaaatgctaatgtttgtaaagcaccttcagttcttcggatgaaaggtgctatattccctcagtgtaaattaataaaaagrttacaggaagtttgtcaaaaaattcaatgcatagtctgtagtatgtcctgacaagaagttagcattttatataagaaattaaaaaatgcttattcctccacttggttgcttgactggtgaacaaaagtgaaacctttttttttttgttttgcatttgactctgagctaagtgttccaactctttaaaggcaatgtttattgttacaacctcgatccagtgcccagaactatgcttcrtgagatcatcacaactctttaaattgtatatttacagtgtgtagtgatgctgacgaaatacacggtagtaaaccaaaaagaaacatttggaaagtcccctagcatgatgccagacacactagatgcttggggaaggttggttctgcattcccctcctgttttctatttccgtatcaatttattggtgaatttgtgccctcatgagagtaggcttatgctggcttagatcattcaaatgttttcttaattcaaaaatgcatgacatttatagatttgtgttgtcaacaaaaatactacataagtatattccactcaatccctaggcacccactatgctcagcagcactgtgcttttgtatataaatggtgggttataaaagactgcatggaggcattatggaatagcacaggctttgggatcagatctgggtgaaaaccccagctctgtcatgcagtaatagcaactaacctgtatacagcatatgtgctaaattgttatgttctctattttgtgatgcccttgctgtatgggtctatgactatattaccttttattttttttttttcttggtagagatggggtctccctatgttgcccgggctagtcttgaactcccggctgaagagatcctcctatctcggccttccaaagcactgggattacaagcataagctactgtgcccagcccaaacttcaaaaaaattaataaatcttgttcatccttctctagaacttttctccccctagatgaggaaataggcttagagaggataggtgacttgtctaacgttgcacaagagagctggaacttgaatccctagagggcacaccagagtatttctttagcgctctattttaagcaatattggttattgtagttgtgtgaccctgaacagattgaattttctgaatcttaagtttctgtgtctaaaataagagaatatcaggcagggttaatctcactattaaaaatagcacacacaaagcacccagtatctggtccaaagctgccttttattaagggctcatactcataggccatttgttcaaattcattgtagttgggaagaataatccaaggcaatgtataattgctaacatagtgtagattttgtaagtacaacacatctggacaaggaaatgtttgatgtaggatggagtaattggggaagataaagaggaagtgtgaattaagtgtggactggaatgatgggatttgtatgtcttacagagttaaaataagcagagatcacttggacacaatgtgaagactcgaggatcctttttgggaaggcgtaagaaatgaataggtcctgttttattgacaatatctgccatatatcagtgaggattggtcaattatggaagatgctaaaaagcaggcaatggatttttaataaggaatataataaatgtatttcaagattacttccctagtgagttgatgatcccccttcgtctgacacaaattattctcgagttctttcctctctctggcttgataatatgggtggaaactgttagttgagattgaggtgatttgtggttctgtgactttaggattacgtgaaatactaatttgggggaccaacagagatttgacattttttcaaagcaatttttcaattcctactacaatttaccgtcagtattacttcataaatggaaagtcattttaccattaaagatgtaggtaggaccatctcagaagaaaagacaactctttacaccaaatacatttggttttgtgaaaaactagtatcctaatttttgccgcttatggagatcaatgagagattttccccaccccaatgttgacatgtactactcgacgctgtcatattattgaggcataaaagatgttctaataaaatggaagtgacttaagagaaagttttatgcctcctcccaactctgaacagatgctgagaatataccaaacaagttcacacaggagtagagatttagagaggccttcccaccttcaagaattttataatacgttaatgagctgagtcttattttcaaggatggctttgttaaagcagaagaagggtaactatgcttatgaaaggcagttttgcatgcctgtttgtcaaaaaatacagtacaatttattttaaaattgattaattggtgtagaacttgcaatggtcacacaatcaggatggtcagcttccattcagggatcaaatttgtccaggcctttcaaaatggaacacgttgcttttagtatggcattggttctgtttgtagtgctgatttttctttcatggtaattaaaaaaaaatcttactttcttaaaagcctgcacccaagctagtgagcttttctgcagaggattgagcatccaaaccatgctttattttggtggattcttagagttttctggctgggtcctttttgaggggtagctgtgagctgtgagacaatttcagcaagatgtagggacaaggatcgcattcgaggtggcttaaaaggaaacacgtttgtgagagttgcctcactgtctcacctgctagaagaaattgggagatttcagggcttgttttcggtcctggcgtggtgcagaggtggaggggcgccagcaggtgtgtggtatgcaggacgcagagccaggagaacctggggcaggtgtctggagccgggggtgcagttcctacttttagacgcatggtggcgctagggtctcctccggccctgctagcaatctctaaggcacctccgccgccacctgcagtctcaaccaaacctctgggtgggcagcgcgggatgtgacgggccgagcgtccaatcgactgacagatttccgtccacactactgctctagccaatgggagccgaggagaggcgcggaggaggcgggccccgcggcaagcctggcagaggcgcgaggccctcctcccgcctctccgcctactccagcctccgccgcctcagcttcccgagcgagccctgcggccgccggagcagctcccgcggcggagcaggagccggatggtcagaggagcccggcagccccagcagccgcggagtcgcctggcccccaggtgcgggggctgggtggaggccggggttggggatggggtgggggccagggagcgggcccaggggcagcggctcggggcggtggagcattcggggcgcagagaccggaggggcggggggtgcaggctggggggaccttgggggcgcctgcaggcggcggcgcgggctgggcgcgatcgcctcctcgaggccaggtgagaggggcgtgtgagggaaggggcgccgaggggtgaggctggcggcgcggggccgggaggggcaaggcgggcgcgcccccggaggggccgtggaatgcgggggtcgccgggcccggagaggcggggcgtggagggggcagtgcacggtcgggaacgggtgggcacaggaaaggggaggctaggggggcttgcgggggtgacgaggcagacaatgagtaggtggaggtgggtgattttggggagctgggctgtgacgagcaggggtcgaggatggggtgagggaccaggaaggtttgagctcagggggaattgggggaacggtgagtcccaggaatgctaggtcttggtaaataggggaaacagggcatgaggcgtttgtaaggtcagatctgggcttggcgagcctgtggtcccagagggtggtctatttagttcttgactggcacggtagcgccgggagatgttttcttgtatgttacttttagttaccgtcttatttgtttggtctgcagactgactggcacagtggagaaaccgcctcgaaaacggagaagcaggtaaggcagtgccttcctattttgcttcatgtttttctttttgcttggctgcacctgtgccgtactgcataattgtatactgtcagtagatgaagtttcttatttatcccccttttaaaagaatataaccacatgcatgatttttcttttgaggacttcaaattactacctstacagtcgattttttttttcttggtatctaagataatgtgggaaatcttgagaaatcctacttttttactttttgatgttgtgtaaggatctcagctatttttttttttaaccttagccataatttcattttctccagcatctctgtttaaaaagctcatcttggctggggtggctcatgccttcaatcccagctctttgggaggctgaggcaggaggatcatttgagcctgggagttcaagaccagtctgggcaacagagcaagactccgtctctacaaaaaattgaaaaactagccggtcccataaatatatacacctactatgtacccacaaaaacaaaaaattaaaaaaacaaaaaccaactagctgagcgggtgttgtggacctgtagtcccagcttctcaagaggctgaggtgggaggattgcttgagcccaggaagtcaaggctgcagtgatgcagtgagcygtgatcatgccactgcactccagtgtggggaacacagcaagaccctgcctcaaaaaataaactaattttattgagcatctactatgtgccaagtactgtgtacgaatgctctatgtgtatcttctcctgtaatcctcaaagaaccctaagagaatatgtagtgtcactattttacagaagagggaactgcgacacagagaggccaaatatttacccaaaatcatgcatctagtaaaagataaaaccaggatttgaatccagacagtctgactccagagcttaagctcttaactgttataccataatgctgctaataaatatgcaattgaaagtaggttttcttattgctttatcttttgtcgttggacactgtgtagttaactcgaatggttgaaccttaggaaaatagaagcaaagagtttaagtagtccacaaacaaagtgaattagtccttgagtaatggagatgaagatatatttatcacataaacatttttgactgcattccatgtgagaggtactacatagcaattctgtgtagtcattagatgattcctttttcacagatgttggcattgacctagagaaagtaagctactgtagttatgtgaccagtaggactactttcatagttaatatctggcaagttaatgatgttaatacacagaaaacctcaatagtaaatagacacgaaaygctgatggtggaagtgccaacagagtttccttgtcacactttaggcctgtactgtccaatccagtaaccatatgcagggtgagcactcaaaatgcatctagcatgactgaggaactaaatttttaattttatttaattgtaattaaattaacttgagaaactgctacttgatcasctattggaaaacgttcaagtatgttttgaacaacttgggtatgtgagtctgtatttttcatccgtcattttatgaaatctaagtatatatcaaatatttccaatgagaatttagggtctgaaatgagataagtataaaatacatgctagatttcaagttagtacaaaaattgaataaataaaatttctcagtaactttttatattgatgacatagtgagayaatattttaggtatattggagtaaatacttttttttttttttgagacagggtctggctctgtcatccaggctgtagtgcagtggtgcaatctcagcatactgcaacctccacctcctgggctcaagccacccagccaattcagcctctggagtagctgggactacargcgcctgacacctcacccagctcttttttttttttttttttttgtagagacaaggtttggccatgttgcccaggctggtctcaaactcctgggctcaaatgatccaaccaccttggcctactaaagtgctgtgattacaagtgtgagctgccatgcctggctgtaaataaaattgttactaaaattattttcacttactttttcctgagacaaagtcttactttgttgcccgtactggagtgcagtgatgtgatcttgactcactgcaatctccgcctcctgggttcaagcaattctctttcctcagcctcccgattagctgggattacaggcgcctgccaccatgcccggctaatttttgtatttttagtagagacggggtttcaacatgttggccaggctggtcttgaactcctggcctcaagtgctctgtctgactaggcctcccaaagtgctgggattacaggtgtgagccaccgggcctggccttcacttacttctttttcctttttattttycttctgagacagggcttggctctgttgtcaaggctgaagtgaagtggtgcaatcacagctcactgcagcctcgacctggtaatccttccacctcagcctcccaagtacctgggactacagatgtgcaccaccatgccaggctaactttttattttttgtaagagacagggtctcactgtgttgctcaggctggtctcctgtgctcaagtgatgcgccagccttggcctcccaaagtgctaggattacaggcgtgagccaccatacccagcctttctttttattttttctaatatggctactagaaaattaaaagctgcatacatttaacttgcattgtatttctttgcattgtatttcttttggatagctctcatttaactctcattaccccactgccagactcttcagtagccttctgactggtttccctaccttgaatctgtaattccctccctgtactgtgcaaatcgatcttgtaattctcatgcttaggatccctctgtgcttcctcattgcttattgaacatcattcagacttttagcctaatcatataaaaaaattgcctttattttacttcttcatactttcccagccacggttaatactttggccatatcgattttcaatgatggaactattaaatgtctacttttaaatgatttaactttctggtgaaccttcaagatgaattaattgctgaatgtaactccgtgctccatttgccattcccagaacttatgttccctctttgctttggttttttgtttttagggtttttgttgtttttgttgttgttgttgttgttttttaaagacggtctcacttcagggtggagtgcaatggtgtgacaatggctcactggagccttgacttctcgggcccaggtgattttcccacctcagcctcccaagtagctgggactacagatgtgcatcactatgcccagctaatttttgcattttttgtagaggtggggttttaccatgttgctcaggctggtcgtgaactcctgggcttaagctatctgccttcctcagactctcaaagtgtttgaattataggcgtcagccacagtacctggtctgctttgggtttttgtatgtgatttctttttctttctggagtactttctccttgctccttgacaagccccctcctttaagactttgctcagtgagggcttccccccaccctccctctgctccaccttattgggtcccatcatggcctgtacatacacttacatgaaatggtctgggctgaatttgaattcagctctgtcaaatgtagtttgcgagatcatgtgcaagttaataagcctgtctctgcctcagtttcctcatctatatagtagaaataatagttctgctggcgtggtggctcacgcccgtaatcccagcactttgggaggtcaaggtgggcagatcacctgaggtcgggagtttgagaccagcctgaccaacatggagaaaccccatttctattaaaaatacaaaattgggccgggcacgatggctcaatcctgtaatcccagcactttgggaggccaaggcgggcggatcacaaggtcaggagatcgagaccatcctggctaacacagtgaaaccacgtctctactaaaaacaaaaaaaatcagctggacgtggtggcaggtgcctgtagtcccagctactcaggaggctgaggcaggagaatgacgtgaacccgggaggcaaagcttgcagtgagctgagctcataccactgcactccagcctgggcgacagcgagactccgcctcaaaaaaaaaaaattggctgggcgtggtagcgcatgtctgtaatcccagctactcgggaggctgaggcaggagaatcgcttggacccaggaagtggaggttgcagtgagccgagattgcaccattgcactccatcctgggcaacaagagcgaaactctgtctccaaaaaaaaaaaaaaaaaaaaaagaaataatagttcgacttccccaaggttgtaaggtgcctaggatagtgcctggcacatagaaggtacacaataaattttaggttaaaaaacacccatcaaatatcttttatttcccacttcttttcaaaatgagaagattaaaaataaaggccaagaagaaatgaaagaagcagataaagccagtggcagaattagtgcatggaccggaaagtcctgcatcattgctaatggttgctttggtgtttggctctgagttttctggagtaaaatgaagaagaaaataaagttcagttttcagattcatggtatctctaaaatcaaacgtgagtttttaaagattgcttcttggccaagcgtggtggctcacatctgtaatcccagcactttgggaggctgaggcgggtggatcacctgaggtcaggagtttgagaccagcctggccaacatgacgaaaccccatctctactaaaaatacaaaaaattagccgggcatggtggcgcgtgcctgtaatcacaggtactcaggaggctgaggccagagaatctcttgaacctgggaggtggaggttgcggtgagctgagattgcaccactgcactccagcctgggcaacagagtgagactccgtcttaaataaataaataaagattgcttcttatacttctcaatccaagtgagttattgccagtgaacagtctccacggggccaaagcaatgtggttttggtatatggctctctgatggtttggcttgattcagaggtaaagagggatgcgtacactgtggggactatacgtgttttgttcactgtttatccccagcagctagaatagcatctggcacgtagagaacagtttattgaatttttgagtgaacaaatcctttagtaattctccaggaatttaagtaagcatcaggttgcaatgagtttattttctcagtccagaatcatgaggctacatattcagcatgcctgatttaggttagatcctgatcatgtcagcattttgacctgaatggacaaccagcacatgtatttaaaggtcctatgggcaggaccaagattttcctcagaaaacagtgcaggggttgctctaaaactagaaaacaaaatgtacagttaagaccccaaagatgaattatagaataaggatgtaatggttgtagccagatatttaaaaaaataggtgttaggccgggcgcggtggctcacacctgtcatcccagcactttgggaggccgaggcgggtggatcacaaggtcaggagttcaagaccagcctgaccaagatggtgaaaccccatctctaaaaaatacaaaaattagtcaggcacaatggcgcatgcctgtaatcccagttacttgcgaggctgaggcaggagaatcacttgaacctgggagaaggttgcagtgagccgagatcgctgcactctagcctgggtgacagagcaagacttcgtctcaaaaaaaaaaaaaaaaagtggtattagttgccgggcatgctggctcacacctgtaatcccagcactttgggaggcccaggctggcagatcacgaggtcaggagtttgagaccagtctggccaatgtagcgaaaccccgtctctactaaaagtacaaaaattagccgggcgtggtggcaggcagctgtaatcctagctactcaggaggctggggcgggagaatcgcttcaacctgggaggcagaggttgcagtgagctgagaccacgccattgcactccagcctgggcgacaaagcgagactccatctcaaaaaaaaaaaaaaaaaaaaaagaaaggtattagtatcagttttatactgtggctatagaaattctgaatatcaaatgatataaattcctggtaaacacttcaagatgaattaattgaggcagatgaatggtgtgagcccaggagttcaagaccagtctgggcaacatggtgaaacctcatctctaccaaaaatacgaaaattagccaggtgtggtggtacacacctgtagtcccagctagttgggaggctgaggtgggaggatcagctgagactgggaggtggaggctgcagtgagccatgattgcaccactgcactccagcctgggcaacagtgaaaacctgtctcaaaaaaaaaaaaaaaggtaagttaattgttgaatgtagccttgagtaactgattgaacgggtctgctatgtagagttgttgacagttatattacatatgtagtacattttagaaaacagttgacagaattatggttttttttttgttttttttttttttgtttgagatggagttttgcttgttgaccaggctggagtgcaatggtgtgatctcggctcactgcagcctctgcctcctgggttcaagtgatcctcctgcctcagcctcctgagtagctgggattacagacatgcgccaccacacccagctaattttgtatttttagtagagatggggtttctccatgttcgttaggctggtcttgaattcctgacctccggtgatccgtccgccttggcctcccaaagtgctgggattacaggcatgagccaccatgcccagcccagaattaggattttaaaaatttttatttagttttgagatggagtctcactctgtttcccagaccggagtgcagtcatgctatctcggttcacagcaacctctgcctcctgggttcaagtggttcttgtgcctctgcctcctgaatacctgagattacaggggcgcaccaccatgcccagctaattttttctgtttttagtagaggcggggtttccccatggtggctaggctgatctcgaactcctggcctcaattgatccgcctgccttggcctcccaaagtgctgggattacaggcgtgagccatcgtgcctggcctaaaattatgatttttattttaggatattgatgttaaataattctttttgataggtgttagttagtggctgagttatcttttgagaacatttctagtgcagaccaaactgtaagacagtttaagaaaaacaaagacagtttgagataagaacctcatgcattattatttctttgtatctttttccccttaaaacttttatttccttatcatagttcatctttgcacccttataaggtactaagggggagctcagtaaaactagtgaaccaataaatgaattggtggcaagaggagttagtgtgggatgggtttggttgtccaaaataatgtgatactatttaatgcccctgaaaaactgcaatggactgaaaggagttttaagattaggaaactggccgggcgtggtggctcatgcctgtaatctcagcattttgggaggctgaggcgggcggatcacctaaggctggaagttcaagaccagcctgaccaacatggagaaaccccgtctctactaaaaatacaaaattagcctggcgtggtggcgcatgcctgtaatcccagctactcaggaggctgaggcaggagaatcgctggaaactgggaggcggaggttgcagagagccgagatcgtgccattgcactctagcctgggcaacaagagcgaaactccatctcacacacacacaaaaaagattaggaaacttggtctctatgtgcttttggaaaattctgaagagtccaatatgtctgttaatgatgtttgggttatgagttggagaatcctttctggtcctattaggaacaagatccatttgtttggataggattcacattgatgaaagctttactgtatgatttgggggcttttgttgttgttgttgttgttacatatttaaagcaaagagatccgggcattttgttgttgtatgtaatttgtttaagaaacatttgaatgctttctagttctgggttctagggatatagatatgagtgaggtggccgttgttggggaaaatctcatgtattaatgggaagacagacactgaaatatgagacagtgtaatgactttgtatatatacaaaggtttacacagtacatacaaagggtttataggaattctgcatagtggtagtgagggcagtttctgcagtcatttatctaagccctgaaggtttagaaggttaatttgttggtagtgtgactattgaaatgacaagagatgacagcctagatgtagactgactaataatgaggtcttgggtgaactaaattcaggacctgaaccaagatagtgccagaagtggaaagaaagatgtttttaagagcttgggctgtggtgtcagactaaggggtggttctcaactaagggggttttgcctcctaagggacatttgagaatgtctggagacattttgggttgttacaacttggagcacctagtgagtagaggccagatatactgctacacatcctaaaatgcatgggacagcatcctaatctaagagttccccagctcaaaatgtcattagttctgaggctgagaaatcttgcattagagtttgaatcctagcccttccaaatgtcctcaccaatacttggtcttgtgattctttcttttttttttgttttttgaacaggtctgtagaggtacagttggcatacagtgagctgtacatatttgaagtgtacaatttgataagttttgaaatacatgtatacccttaaaaccaccaccattgtttgccattctgtgggtgtacactggtacgtgtcattgtggttttcatttgcctttccctgatgactgataatgttgagtatcttttcatgtgctaatttgccattcatataacttagtgaagtatccaaatcttttgctcactttttgtcagttgtttgtcttcttacatagttgtaagagttctttatgtattctaaaaacaaaatttaaaaaagcaaaatcttttttttttgtttttgagacgaagtctcactttatcacccaggctggagtgcagtggtgtgatctcatttcactgcaccctccgcctcccaggttcaagtgattctcctgcctcagcctctgtaggagctgcgattaaggcgcctgctaccacacccggtgaatttttgtatttttagtagagctggggtttcgccatgttgcctaggctggtctcgaactcctgacctcaagtgatctgcccacagcggcctcccaaagtgctaggattacaggtgtcagccactgtgcctggccacaaattcattattaggtatgtgttttgcttatgttttctcccatgtatggcttgccttttacttttctccacagtatcttgagatgcttgcagcttgaataataggttggatgggaatgcttttatttatttatttatttgtgagatggagtctcactctgttgcccaggctggagtgcagtggtgcgatcttggcttactgcaacctctgcctcccaagttcaagtgattctcctgcctcagcctcctgagtagctgggattacaggcgcgtgccaccatgcctggctaatttgtatttttagtagagatggggtttcaccatgttggtcaggctgctcttgaactcctgtcctcgtgatctgcctgccttggcctcccaaagtgctgggattacaggcatgagccaccgcaccagcctgagaatgcttttaattgagacagcagacacaggagcaagagcaagtttgggacggtaagaacatgagtttattttggctatatggagcgtaaggtgcttcaatgaactgtctttaaccaggcggttaaaaatatgggtgttttgcagagaagcaagataacggcttcaggtatagattttaaagcattcagcaaacacgtggtgatccaagtcatgcaaatgaatggaatggatcattggctcattgatccattggatcacacctgtaatccaatggctggatgcagtggctcacacctgtaatcccagcactttggacggccgaggtgggtgggtcatgaggtcaggagtttgagaccagcctggctaacgtgatgaaaccctttctctactagaaatacaaaaactagccaggcgtggtggtacgtgcctgtaatcccagctactcaggaggctgaggcaggagaattgcttaaacccaggagctggtggttgcagtgagccaagatcgtgccactgcaccctaacctgggtgacagagcatgacgctgtctcaaaaaaaaaaaaaaggaaaaaagaaaagaaaatgaatgggataacctagcgaaagcatgttgagtgaaatgcaaagaaatagaacgtacagtaacacggtgtaaaaatagaccaaactgctttctgtcttttgggtgttatctctttctctgcagtgttaatctgtccactgcagggtatttctgtaggtagccgtcagacaggtagtgtttatctccaggagtttagatctctgtactctttgctgagaaacaggttctgaaggtagtttcttggaaaactagaacatttttctaatctacactgaaacacaggactattctagagttacagagctcatggtaggtttgcctcagcaacatccgtacagcaaatgcagtggttttggtaaagccatttcttgtagcatggtcagtgaaatcctagggcataaagctaaaattcagttctgtgaaagcagactctgcagggccaagatagcatggtcagtgtatgcagcattttcacggtaatattttactcaagaatgaaacctagaagagttaagcagtgattttcaagggcattcaaaaagagctcataggtcctgtgggactcattcaagggcttcctggagggtagagtgccaggagttgccagagggaggttaacaagcctagcctcaggcgctactcctatattttatatatgtatatatgtttatttttcttttttttttttttttgagacggatcttgctctgttgcccaggctggagtgcagtggcacaatctcggctcactgcaacctccgcctcccgggttccagcgattctccctcctcagcctcccaagtagctgggattactggtatctcccatcatgcctggctaattttttttgtatttttgtagagatggggtttcaccatgttggccaggctggtgttgaactcctgaccttaggtgatccacccgcctcggcctcccaaagtgtttggattacaggcgtgagccactgcgcccagtgctaataattttttaaaaaaatatctgtttgttagctggatgtggtgttcttgcacctgtagtcccagtcccaggtatttgggaggccgaggtaggagcatcacttgagcccaggagtgagttaatgcccagcctgcacaatatagtgagacctctgtctccaaaaaaaaaaaaaaaaaaaaaaaaaagcggttcaaaccaagatccagataaggttcataacttgtaattagttgagtagctcttgaagtcttttttagtctatagcttttccactcattttttcctgtactatttattttttgaagaaagcatgttcgttattaagagttttccagtcttggccgggcacagtgggtcacacctgtaatcccagtactttgggaggctgaggcgggcagatcatgaggtcaggtctctactaaaagacaaaaaaaaaaaaaattagccgggattggtggtgtgcagctgtagtcctagctacccaggaggctgagtcaggggaatcgctccaacccgggaggtagaggttgcagtgaactgagattgtgccactgcactccagcctggcaacagagccagactccatctcaaagaaaaaaaaaagaggttttcagtctgaatttttaatttttaaaaaagttggtatataatttacatagggtgaaattcacctgttttagttctttgaattttgacgaacctagttgtgtaatcacaactataatcataatatagaacagttccatcactccccaaaattcccttctgtccccccgaccaattggcaaccactgaccagtttttccacagtctgaattttgctgactttatgacctcatggtatcacttagcatgcttctctgttccgtttgtgtcttgtaaattgatagagttaatttgcttttttgttttaagaatgctttggctggacgtggtggctcatgcctgtaatcccagcactttggaaggccgaggcgggcggatcacctgaggtcaggagttcgaaaccagcctggccaacatggcaaaaccccgtctctactaaaaatacaaaaattagctgggcgtggtggtgggcgcctataatcccagctactcgggtggctgaggcaggagaatcgcttgaacccaggaggtggaggttgcagtgagccgagatagcattacggcactccaccctgggcaacagagcaagactccatctcaamaaaaaaaaagaaaagaaaagaaaaactgcagcatagaagtgatgtgaactttcattaaagcttctcttttttatgttaggaacccatagtaatcggtatctagatttatgaattcattagggttgcaaatgttgaaattctaattgttttgcccatgcgtggtggctcacacctgtaatcccagcactttgggaggctgaggctggtggatcacctgaggacaggagttcaagaccagcctggccaacatggtgaaaccccatctctattgaaaatacaaaaatcagccaggtgtggtggcacgtgcctgtaatcccatctacttggtaggctgatgcaggagaatcacttgaacccgggaggtggaggttgcagtgagccaagatcatgccactgcactccagcctgggtgacagagtgaggctctgtctcaaaaaaaaaaaaaaaaaaaaaaaaaaagaaattctaattctttcattccttctttttatttattttttttaagttggagtctgcgtgatctcggctcactgcaacctccgccccctgggttcaagcgattctcctgcctcagccaactgagtagttaggattacaggcgtgcaccaccactcctggctaacttttgtatttttagtagagacggggtttcaccatgttaaccaggctggtctggaactcctgacctcaagtgatcggctcgcctcagcctctcaaagtgctaggattacaggcgtgagtgccactgtgcctgtctcattccctcttcattattagctggaatacttccagaaagagacatttcccttactgactgaaacaattttttgaattttatttatttatatatgagagggagttttgctcttgttgcttaggctggagtgcaatggcgtgatctcggtgcactgaagtctccgcctcctggattcaagcgattctcctgcctcagtctcccgaatagctgggattaaagttgtgcaccaccacacccagcaaatttttatatttttagtaaggatggggtttctccatgttggccaggctggtcgtgaactcctgacctcaggtgatagacctgcctcagactcccaaaatgctgggattacaggcgtgagccactgtgcccggcctgaattcaattatttatttwttttttttgagacggagtttcgctctgtcgcccaggctggagtgcagtggcacaatctcggctcactgcaagctctgcctcctgggttcatgctattctcctgcctcagcctcccaagcagctgggaccacaggcacacaccaccacacccggctaattttttgtatttttagtagagacggcatttcactgtgttagccaggatggtctcgatctcctgacctcgtgatccacccgcctcggactcccaaagtgctgggattacaggcgtgagccacagcgcctggccatttttgtatttttaatagagatggggtttcaccatgttggccaggctggtctcgaactcctgacctaaggtgatccacctgcctcagctccacaaagtgctgggattacaagtgtgggccaccgcacccggccaaattacccgtatacattttagagaagggggtcttgctctgttgcccaggctggagggcagtgccacagtcacagcttacagcaccttgaacgcctgggctcaagcagtcctcccacctcaacctcctgagtagctggtgccatgtgccactgtgcccggcaggttttttatttttaaaaattgtttgtattgatgggtgtctcactttgttacccaggctggttgcaaatttctggcctcaagcaatccttctgccccagcctcccaaagttctggaattatagctgtgagccactcactgcacctggcctagaattttttttttttttgagatgcagtctcactctgttggccaggctggagtgcagtggtgtgatctcagctcactgagacttccacctcctgggttcaagcaattcccctgtctcagcctcccgagtagctgggactacaggaacgcaccaccatatctggctaatttttgtatttttaatagagacagagttttgccatgttggccaggctggtctcaaactcctgacctcagttgatccacccacctctgcctcccaaagtgctgggattacaggcgtgtgccacctcgttcggccggaaaaatcttaaatggagcagcttgtttggaactttctttgaaaccaccaatattacttatttgcaaaagatatccataggttagtacattaattgactgtatagcacatatgaatcttacctcatgaaatcaggtaagcaaaaagtattaacaatattttaattcctttaaatgaaatcaaattctgcccttgggggcaggtgtggtggctcgtacctgtaaccccagcactttgggattctgaggtgagagsgtagtttgagctcagactagcctgggcaacataatgagaaccygtctcaaaaaaaaaaaaaaaaattctgccctgggaccttctccccctcaattctaccaaactggttagaaatacaatctcagtgattaataatagagatccacccctccttagagttatgtgagactctaataggcttttgaggtaccaggagaagggtggaaggttgattttcagcctgtgctggatgtgactgagcacattgtctaagaggatatgaggcgttgaagcctggggattctgatgtacaggcttcagctttgcttggtacaacacatgcccatttctctctgaggacttgggcactgctaggacgtggggttgcaggttccctttttgtggattctgaaggaattccttcttctcagataaattgctcccatttttcttcttatttctacctaacccccagctcccgccaaaggcactcattgttctacccttcttccctcagtataatctcctcaaggagttcatattttcagaaaacatgcacaaacctcccttgaggcaaagaagcaaataggactatcatcttggggattgggaagtaccatgataataaaacatccattgatgtcttaataacttatctggctacttatattttcatcagtaattctagtccctgtagtgggacttaatgatctatccaaaaatgatttgattttcccttctttaaaagatggagctgaattctcctcccttgagtgtgggctggacttagcgatgcacttctagtgaatagaacacaggagaagtgatgagatgtctcttcccagattgggtttttaaaagactggtttctgccttgcatgtgtgttctctctctctctctcacacacacacacacacacacacccacacccacccacccacctcactttgcgggaggctagctggctagctcagattgggttttaaaaaaactggcttctgccttgcatgtgtgttctgtctctctctctctgacttctgccttgcatgtgtgttctctctctctctcacacacacacacacacacacacacacacacccccaactcactttgggggaggctaactccatggtatgaggcagcactgcatagagggaaggcacttgccatgttgtgaagacagccacccaggcagcccatggggagggccatgtggtgaggaagtgaggcctgccagcaaccacaacagctagcttggatgtagatcttctgaggcctgctggcagccacatgactggctcagaaaagtgagcttgaacagggatcctcctactctagttgagccttgaggatgactatagtccaagccaacagcttgactcattgtcctggcttcacaagggctgagttatgtgaatctgtgattttccttggagagtctcctttcttccagcactggcttcattgtacccaaggggctcaatgtccagctaagatttctcttatcctgtataggtttctgatggacaaagagagagaatgtgtgtgtgtgtgtgtgtgtgtgtgtgtgtgtgtgtgtacgtgtacgcacgcatgcatgagagagagaatatgtgtgtgtgttttggaagcagctatcttttttttttttttttttgagacaaagtctttactctgtcgcccaggctggagtgtagtggcgtgatcttggctcactgcaacctccgcctcccaggttcaagtgattctcctgcctgagccccttgagtagctgggattacagtgcctgccaccatgcgtggctgatttttttgtattttttgtagacacagggttttgtcatgttggccaggctgatctcaaactcctgaccttaggtgattcacccaccttggccttaagaagcagatatcttttgattaaagggcagttcagttttatttttctttcttttttttttggagatggagtatcactctgttgcccagactggagtggagtggcacgatcttggctcactgcaacctccacctcttgggttcaagcaattctcctctctcagccacctgagtagctaggattacaggcatgtgccactacacctggctaattttgtatctttagtagagacagggtttcaccatgttggccagcctagtctggatcctgacctcatgatcctcccacctcggccactcaaagtgctgggattacaggcgtgagacaccgcgcctggccttcatttttaaatttaattttattttttttaagacagagtttcgctctgtctctcaggctggagtgcagtggcgccatctcagctcactgcaacttccacctcccggatttaagcgattctcctgcctcagcctcctgagtagctgggactacaggtgtgcgccaccatgcctggttaatttttgtattttttatacagacggtgttttgccatgttgaccaggctggtctggaacccctgacctcaggtgatctgcccaccttggcctcccaaagtgttgggattacaggcgtgagcctcccacacagattgggaggtagtcctctgctcttgtttgccttgttaagggaagggccgtaaggtagttatccagtgaagagtcagttttcttctgcctgctctctctcaccaggctttaaactctttttcaaccccttttcttggctttttgggaagagtgggcaaaatagagccaagtcagttatgatggttcattttatgtgtcaacttgactgggccactgagtgcccagacatttggtcaaacattatcttaggtgtgtctgtgaggatgtttctggatgaaattaatatttgaagtgattgagtaaaacrgatacccttccgagtctgggtgagcctcatccaatcatttgaagacctggctagaacaaaaagactgagcaagagggagcttctcctgcctgactccttgagctgggacatcagtgttttcctgcctttggacttgaaccaaaactttggctcttgagcatggtagctgttgtattggaacttgcgccattgattcccttggttctcaggcctttagacttggactgcaactagaccataggctctcttgggtctctagcttactgactgacaatcttgggacttttcagcctccataattgcatgagccaattccttttaataaatatctttttaaatatatatacctctgtctctgtctctctacctctacctctgtctctctcctgttgattctgtttctctggagagccctgactaatatataagcctagtcttttattgccttacttttgtctcatttcaggtttttcagagtgctcctaatctctgagaacttctgcattactggcttaattctctgcattgacgcagtctgtcatgaaatggctatcttcatgacaaaccaagcaaaaggagaggtgcttgggttttcataaacttggcagctgttttggaaacattttactctaaggctaggcaccactgtttgtattcttattttgcatttggggtttctttctcctaagttctctctccatatattctcctggcctggaaggcatgtgtgcctgtttgacagtgtcctggaaattcttttctagacggggagtgcatgttgaaggtgctcacacgtggtttcctaaaatcctgcaaagtgrcagttaggacttttgtttgtttgtttgtttctttgtttctttgagacggagtctcactctcgcccaggctggagtgcagtggcgtgatctcggctcactgcaacctctgcctctcgggttcaagcgattctcctgcctcagcctcccaagtagctgagattmcaggtgcccgccaccatgcccggctaattttttgtatttttagtagagacggggtttcacgtgttagctaggatgttctcgatctcctgacctcgtgatccacctgcctcggcctcccgaagtgctgggattacaggcgtgagccaccacacccggcctgccagttaggacttttaaactcttaggataatttccaaactatagagtcatcatgtatagattttcagagaacaactgccaaaaataaagattttagatttagaattgttgacataagcctttttttttttgagttggagtctcactctcttggccagtctggagtgtagtggtgcaatctcagcccactgcaacctccatctccccagttcaggcaattctcctgcctcagcctcccgagttgctgggactacaggcacgtgccaccacacctggctgattttttgtagttttattagagacagagttttaccatgtctctcaggctggtcttgaactcctgagcacaggcaatctgcctaccttggcctcccagagtgctaggattgcaagtgtgagccactgagcctgtcgtagcctgtctttctaacaatagataagcaagctgtttttctattgaggtaacacctggctggtgataataaaattgtcatcaagtaaaaggattcttacttttgtataaaataggaatatgcatstatatgtccaaaacagktttttaaaattttactaatttatttatttttgagacagggtctcactccagtcacctgggctgcaatgcggtggtgcgatcttggctcactgcagccttgacttactgggatggagtaatcctcccaccctagcctctgaagtagctgggaccactgtcacataccactacgcccagaaaattttttgtatttttggtagagacagggctttgccatgttgtccaggctggtctcgaactcctgggctcaagcaatccacccgcctcggcctcccaaagtgttgggattactggcgtgagccactgcacagtgcacaaccagcttttttttttttttttttttttttttgagatggagtctcactctgttgcccaggctggagtgcagtagcgcaatcttggttcactgcaacctctgcctcctgggttcaagtgattctcctgcctcagcctcctgagtagctaggattacaggagtctgccaccacacctggatactttttgtatttttagtagagatggagtttcaccatcttggccaggctggtcttgaactcctgacctcgtggtccacccgcctcgacctcccaaagtgctgggatcataggcatgagccaccgtgcctggcccacaaccagttttaaatcattaagatataagttaaaaagaagaggaaaatgttttaaataatttataagagaattatagaatctgtattgagagactactcagtccaaccgaaagcatagtaggagaaatcctagtgtaatcacattcctgaaaatgaagtccttaaaaatttcttagtcttagtcttttcacatatagttcacttacatatttaccaatgacatacatgtatttagtgtttcctaagaattttatccaaattgcctgtctcatgtacatgctgttgtatataaatgcccttgtgacaaaatacaaataacatttcgtagaggtgtcagtgaaattgtgatacttctgtcattgattttttcaataactagatgataaaatcacagttgtcatatagatgttcatagcatttttactctttattttttatttatttatttttttgagactgagtcttgctctgttgcccaggctggagtgcagtggcatgatctcccggctcattgcaacctctacctcccaggttcaagcaattctcatgcctcagcctcccaagtggctgggactacaggggtgtgccaccatgcctggctaatttttgtgttcttttagtagagatggggtttcaccatgttggccaggctggtctcaaactcctgacctcaggtgatctacccatcttggcctctcaaagtgctgggattacaggcttgagccaccatgtccagcctggatttttactcttaaaaaaaggttcttatgtttgaaaatgttggaaaccactagattaaattatctctggagccagttctagccatttccaaagtggaaaaggactttggcttaagggtggagcctttgcataaggatgtgttcaaagaggatagtacagcatgctggtgacacccccagagctttggcaggtttctagtcactacttttctttgtctttctttttaaattcctacatgccccagaggtttgattcatcttttttccagcatctcgtatgtcatctattgttctctccacccataaaccctcaactgaaacaggatgcaggtggcttagctttttctttaccttgttcacgctgaaactatttgacactatttcacttttaaggatttttactgctgttaacaacagagaatgaaatgaatgaatacaaatttgcacaatttagaattttattaaaaatgagaatttcttatccttcattgaaatgtaaacaaaaaaatttcagttttttagtagttgctaggataatggcagtagactaagtggtgtcaaaagtttcttccaactctgtatttaatttttagtggcagattactcatgtttccttattttatcactcttttttttctgggaagtccctaaatgtcctctctcctatttttctttttctttttttgagatgaagtcttactctgtcactcaggctggagtgcagtggcatgatcttggcacactgcagcctctacctcctgggttcaagcagtcaagcgatcctcctgccttagcctcctgagtagctggaactacaggcgtatgccaccatgccaggctaattttttatacttatttatttgtttgtttgtttgagatggagtcttgttctgttgtccaggctagagtgcagtggtgcgatctcagttcactgcaacctctgcctcctgggttcaagtgattctcctgcctcagcctcccgagtagctgggattacaggcgcctgccaccatgtctggctaatttttgtatttttagtagagacgggatttctccatgttggccaggctggtctcgaactcctgacctcaggtgattcacccaccttggcctcccaaagtgctgggactgcaggcgtgagccactgcgcctggctcttcctcctgtttttctttatcatttgactctgaggataattacttgtaggccattgaattcatttcatcatggggaggagaaactccaggttattgtctttaatctctttactccttgttttttacaggaaaactctacttaataaaaaccaataaatactattaacaaaaagtcaactttggtatattctggcatacaaccaatgtattggtatgacagattgtatttgccaaatgtgtctacagcagtatcgttcattttacatgttctacctacaatgtcatcttcacactcctcccatctagtggtgaagcctgtgtctcagtctcttaaccagagcagacttttgtaaatgcctttaccagtagagcatggctcaaacgacgtgtcacgtttagggctaggttataaaaatgccatggatttctaactttctctctggagtgtcacttttggaatctggctactatgtgaggagcccaagcaactaggagtggcctgtgtaagagggaaactgaagctcctgactctcagccccagctgagctcccagctgacatctgggatcagcttgccagccatgtgagtgagctgtcctaaaagcagatcctaatcttctagttccccatcacagtgccctaatgagtgcttatgtagtgtttatatgtagagcagagatgagttgttcctgtcaaactctacccaaattgcagattcatgagcacaataaaagattgttttaagccactaagttatgtagcaggggataactggattagcattccattttgccggagtttagagatcatactatacgttgaactgtaagaacaagaacaagatrtatttctaccttcaggagcactgttagttttataagagaagaaatatggattatgtgtccccttcctttatagattgttatttcactgtctttcattttacatatttattaaattattattttttttaactaaagagcagtacaaaacaagaaatcaaatattggacaacaatattgctgcctagataactccattttcatgtacttctagtttagaaggttgtgtgcatgttaataagcagtgacttcggaatgattcagaccacatgtgtgaccgtgaaggcagtatcctctttgtaaatcagttgatctataaaatggtatgtacttcatgggtttgctttgagacttcaatgatattacctgccacaaaatattggctgttcattactactgctcccccatcccccgccaacaatagagatgggatcttggtcttgtcatgttgcccaggctggtcttcaatttgtgggcttaggtaatcctcctgccttggcctctcaaagtgctgggattacaggtgtgtgccaccacacccagcctggactttttgatagtaagtgattaggcagtgatacaatagcaaagacatggaaccagttcaaatgcccatcaatgatagactggataaagaaaatgtggtgcatatacaccatggaatactatgcatccataaaaaggagtgagatcatgtcctttgcagggacatggataaagctggaagccatcatcctcagcagactaacacaggaacagaaaaccgaacactgcatgttctcactcataagtgggagctgaacaaggagaacacatggacacagggaagggaacaacactcatcgaggccatgtggggtgggggtggtgaggggacgaagagcatcaggacacaaatagctaatgtatacggggcttaaaacctaaatgacgggttgataggtgcagcaaaccaccaaggaacatgtatacctgtgtaacaaacctgcacattctacacatgtgaactgtattacctgttgtcattatgctttatttatttatttatttatttattgagacagggtctctgtctcccaggctggaatgcagtggcaggatcatagctcactgtagtcctaaactcttggggtcaagagatctcctacctctgtcttccaagtagctgggactacaggtgcatgccaccatgcctggttaatttttttatttttattttttagagttgtggacttgctgtgtttctgaggtttgtcttgaactcttggcctcaaatgatcctcctgtgctggcctctcaaaatgttgggattacagaatgttgggattacagaagtgagccaccatgcttggctccactatgtttattttttaacaagccttttaaatgtattaatattttacatataatgtgtagattttaagtgtttagttcactatgtgttttttaaatcaatttttaattgtttagtgattagttgattacaggtagcaggcactaaaccaaatggaaggaggagtccaagagaggataacttttttcgcagagtgctagtgcttattaggggataaggtttatatattamctcattagaagatgggggcattattcacatttagaaagagaaactgagacttaggaaattaaagtgattgacccaaagtaacacagctaggaagtggcacagtcaagacaaaacagttttgttttgctctgtaaaatttttgctattactgactagtgacattgaaattattcagaaaaacaaaacttggtagagataatttcctgtgagggtttattgaagtcccataaaataaatgaaagcagcccatgataaggaggtcttctggtttcaaatgcttcaaagttcctcaagcttttttttttttttttttttttttgagatggagtctcactctgtcgcccagactggagtgcagtggtgtgatctcggctcactgcagcctctgcctcccaggcacaagcatttctcctgtctcaccctcctgagtagctgggactacaggcacgcaccatcatgcccagctaatttttgtagttttagtagagatagggtttcaccatgttggccaggctggtctcgaactcctgacctcaggtgatctacccacctcagcctcccaaagtgctggaattacaggcgtgagccaaagttcctyaggcttctaaaactgaggtagtgtaattttatcaggcattcctctataatgattgaggtaatcaggtaaaaggagttgttttcagtaacctaggtacgtttttrcttttcagtatgaaagaatataagactaataagaatgaaaattttgtttctaggtagtttatgctattgcatgtgtcttatatgcaagatttaaaggctgaaatgtaagtgatgttacttcattggataacagacaagccacatacttcagaggagatgatggataagtagttaatgaaatgttactgagtgaaaaaaaacctcttcaggtgtgtaggaatgtattatttaattcagtcagcatagaattcctgcaggcctcagatttttctttattctcttatgtttcatattcctttatcctttgcagcgtgtcagatacattgatgtgtttgaaaattgacaccaggtaaagaataaatatgataagtgaaagggtaaatgagagttcagacattctttattttcataaattattcttaaaatttttattttatggaaaatactagctcaaaaaatgggataattaggacagattttcaagagaaaacaatgattttttcaacagatatttttaaagcatctagataggtcaggtacttttttttggttaacattctgaaggcttctgatggagagtctatttgacattcttaaggttactgaaagcagaaaatggttttctcttaatatattattggtgggttttgtctcctagatttttttcctagttcttataaactggtaaaaacctagagtttttatttgtaataaaattttacttgtaataaaaaatttaaacatcttaaaataaattcagtgactgtttcatgttayagtctatcctatattcctggtatccctttttctgttctacttcttattttttaaataaaaaagtttgtgtgtatatattcttttcccctcgtttattcattctagattttgctttctgtcwtccttcctctgctcaaatacaagccctgtgagggcagggatatttctttgttgataaagcacagaaaatagtggaacatagtagatgttcaacaaattctttgttgaataaataatacttttaatattttaaagttaattctaatatatacacaaaagcatatataacatgtatactttttttttaaattaattttttttgagatggagtctctctctgtcacccaagctggagtgcaatggtgcaatctcggctcactgcaacctccgcctcccaggttcaagcgattctcctgcctcagcctcctgagtagacaggcatgtgccaccaygctcggctaattgttttttctgatagagatgggatttcacgatgttggccaggctggtctcgaactcctgacctcaggttatccgcccaccttggtctcccaaaatgctgggattacaggcgtgaggcactgtgcctggcccaacatatgtgtactttaaagaagaattacaaataaatgtctttgttctcactggtcaacttaaaaaatagtgtactgtcaataccttgaaattccctcatattcctcttttctatggcatttgcctccttccctctcctattggaagaataaattatttttattcatttgcatttttttcataattttacaacatgaatataactatattatttaagtgactggatatgactataactgtaaattgattttttagtttcagatttgttaaattttatattcatgaaatgatactgtatgtattctttagtttgctttattcattcaacattaggagtttgagattcatttgtgttgatgcatattgatatactccatttaaactgttacatggtattcagttacatgactatgtcactgtttattctatctgtgggcagttggtttgtgtctaaataacaagcagtgcaactacaaacatttagaaagtgtactctggtgtacatgtgcttcaagagttttttttttttttttttttttttgaggagagtctcgctctgtcacccaggctggagtgcaatggcgcgatctgggctcactgcaagctccgcctcccgagttcatgtcattctcctgcctcagcctcccgagtagctgggactacaggtgcccaccaccacgcccggctaattttttgtatttttagtagagacggggtttcatcgtgttagccaggatggtctcaatctcctgacctcgtgatccgcccacctcggcctcctgaagtgctgggattacaggcatgaaccaccgcgcccggctgcttcaagagtttctttaggccaggtgcagaagctcaggcctgtaatcccagctctttgggaagctgaggtggacagatcacctgaggtcaggagttcgagaccagcctggccatcatggcaaaacccggtctctactaaacatataaaaattagctgggcatggtgtgcatgcctgtaatcccagctacttgggaggctgaggaaggagaattgcttgaacctgggagatggaggttgcagtgagctgagatcatgccactgtgctccagcctgggcaacagagcaagactccctctcaaaaaaaaaaaaaaaaaaaaaaagccgggtgtggtgacacgcacctgtagcgccagctacttagaggccaaggtgagaggatcgtttgagccaaggagttcaaggctggtgtgagctgtgatcatgccactgtgctacagcctgggcaacagagcaagaccctatctctgggggaataaaaaaaaaggtccttcaggttatatagctaaagaaattctaggtcatataaaatgggcatttgtcaactaaatatggacagttgttttctgaaatggttgtaccagtttatgctcccatcaggtacttcagtgagaattccagtttctttccttgccagcacttggtattttaaaaatttagccattatactagatgtataatttttttttaaggaaaaaactttatttcattcttcaataactgtaattactagtggwgtgtatgttgggtattgtacaacttctcaaaccttagaatcattatacaccatcagctcttttcctgtaccatacaattttcacatagcatttattttttatgccagcgactactaacaaccagcttcaccaagatgtgacattattgaaaggaatgttgagtgaccttatgttaaagttgaattagctagaacttgtagtttgcatagtatccgacagatgtcaccgtatttaccttgaaaatttaaaatattttgcagcatccttgtgaatttgatgtgataccccaaggcacctgagcacacagtttgggaaccattgccttggaatattaatcatagttacctccagagagtgaaattttggataattaaaaaaatttcttttttcttgagatggagttttggtcttgttgcccaggctagagtgcaatggcgtgatctcggctcaccgcagactccgcctcccgctttcaagctattctcccgcctcatcctcccaagtagctgggattacaggcatgcaccaccacgcccggctaattttgtatttttagtagagacggggtttctccatgttggtcaggctggtctcgaattcccgacctcaggtgatcagcccgccttggcctcccaaagtgctgggattacaggtgtgagccactgtgcccagccaaaaaaaaaaaaaaaaatctttatactttctggattttccacttttataatgatcatataacacaagaggtgttatgattatatattttatgcattatgattatatatattgcatttactttttaaaatttttaactgaaattcataattttttctactttctttagtctttacctaatatcctttttctgttgcacccaggataccacattacagttagtcatcgcatttcctcagggtcctcttgccagttacagtttctcagacctctcttatatttgatgactttgaaaattttgaggggcattggtcaaatattttgtagaatgtctcaactgggatttgtgtgatgtttttctcatgattagattggatttttagggaggaaaatcacaggtaaaatgcatttctcatcacattgtatcaagggtacatgctgttctgcatgacttatttctgttgactgtaaacttgattacctggctaagatagggcttgtcaaatttcttcattgttaagttactactttattcacgcttttcatactgtactctttggaaggaagtcattgcacagtgcacacttaaagagtgaaggttgtgttccacttccttgaagataaaatacctacataaataagtttttcttcatttaagatttgtctgtgtattcagtcatatatttatgtaattggactcatggatatttgtttcatgctttggtttataatccagtactactttattttcttgctcagattgttctagctttggtcattgggagctcttttcagttggctgataagtccctttgacataccattgtcatgatggctttgtttgattttgtttgttttttaagtatttccttccctttctggcactacaagatgctccaggttcatcttgtatatttcctcagtcatagaatcagatatttctccaaggatccctgattccttttattggagaatggtattagaagccaagagctaggtgttaggtgtgtttgttgctactggggcacaatgtggttttaatttgcattcctgtgatgattgatgacatcagacaccattgtatatgtttattggttatttatatatcctgtttgtcatgtgacaagcctgtttaagacttttcctaacagcagtgttgcggttatgacagagactatatggctcacaaagcttaaaatatttattatctggccggttacaagaagagtttacttgcccctatagttataataactatgttaatgtcagtcctgttctgggttggttttgattggttgatttttcttatattttcttctttccgtgtctggttatctttgagtagatagtagacattgtaaagatacttgagttttttttcttttttataaatttcttgagacttttcttggcacgcagttaaattatttggaaatatttctgttctttaaggtcatacttttaagctttgttaggtggatcagatcaccgtttagggctgtcatcactagggcatataactgtactaatgtgacatgacccttctgaatgccataccagggaattataaggtttttcaagtctggctggtgggaacaggcactattatcgcttgtgtgtgagttccaggcttccaggcactgttccctctaatcctctcagatgattctttcctctctggtagttttcttctacacatgggcttatcagtacttggcggaatacttgagagaaactctccctagatctctaatattttctctctgtgcagctttctcctctacagcattctgtcctgtgcactctagatgccttagcgtctctagacactcagctccatctttttaactcagggcctctgcctgagttcctcttccctgcgctacatcctagaaatgctctcaaggcagtcagctggggtagttgtaggccctcccttcttttgtcctcagagatcactgtccttgctgcctaatgtccaatgtcttgaaaaccactatttagtccagggatgtacaatctttggcttccctgggccacactggaagaagaacagttgtcttgggccacatataaaatacactaacactaatgatagctgatggactaaaaaaaaaaaaaaattttcacaaaaaaagtctcataatgttttaaggaagtttgcgaatttgtgttgggccacattcaaagccatcctgggttgcgtgtggttcatgggccatgggttggacaagcttgatttactctatttcatctgctttcttcctttttttccagataggagggtaaatctagtccccgttactataccttggatagaagtagaagtctttgaggtctttttaaaaaattctgaatggatgtttaattttatcaaatgctttttctgtatctattgagaagatcatatgattttttttctttctctttttttccttctaatgtgttgaattaatttgattgattttttttttaaatgttaaaccaaccttaaatttctggaayaaacccaacttagtcacgatccttttttaacatattgctgaattcaatttactcatatgtgttttaagatttttacatctatattttgtacatacactgcccttcttcaggtttggacatcaagattttccttataaatggttatccaaggttatagtgggtgggaaatgttctctctttttctctagaaaagtttgcataatactggtgttcttttttaaagagaagcggtttaattggttcacggttccacaggctgttcaggaagcatggcagcatctgcttctggggaggcctcagggcgcttttactcatggtggaggcaaagcgggagcaggcctcttaaatggcaggagcagaaccatattagtccattctcatactgctatatagaaataactgagactgggtaaatttgtaaagaaataggcttaattggctcacagttctacaggcagaacaggaagcacagcagcttctgcttctgtggaggcctcatggtggaaggtgaaggagaagcaggcaggtcttacatggctggagcaggagcaagagagtggggaggcaaccagatctcacgagaactcactattgccaattgaaatcatgaggaactacccccatgatccaattccctcccaccagactccacctccaacattggggattgctgttcaacatgagatttggtcagggatacagatgcaaaccatatcagtcgtccaggctggtcttgaactcctggcctcaagtgatcctcccacctcagtctcttgaatagctgggattataggtgtgtgccaccatccccagctaatttttaaaattgtgttttagaaacatagtctcacatttggaccactgtttaattacagatctacttctctaacagatataggattgtttaggttttccatttgcacttgtttcggttttggtcagctgtgtttttctatgaagacaaatgatctgttcaaggtcatacatcttataatgaataaactttccaatcttaaactttttcaaatggtgtcataccaacataatacgtatgtttaaatttgtaaactcttttatcctctctactagaatatcaactagtgggtagattctgtatttactaaaacttcctatcatctgagtcttaaggcctataaayagatatttgaattaaattaaagcatgcttggggccagacatggtggctcatgcctgtaatcccagcactttgggaggccgaggcgggtgggtcacttgaggtcaggagtttgagaccagcctggccatcatggcgaaaccccatctctactaaaaaatacaaaaattagctgggcgtggtggtgcgtgcctgtaatcccacctacttgggaggctgaggcaagagaattgcttgaacctggaaggtggcggttgcagtgagccgagatcacatcactgccctccagcctgggagacagagtgagactgtgcctcaaaaataaatacatagatagatagatagatagatagatagatagatagatagataaatggaaaccttgatttaagtagttgcttcagtagttcatttgggctttgtcagtcaataacacattttacttctgtagtaatgggttactgataagggaaagatatgttagggtatgtattgaataaaaaggtgggaatggtgaattgaaagtatagttctttaaattatttactcatttttttaaaattgtttggtgttttattaaatacatggcactttaataacaaatgtaagctcctctttctctgttaccagagacctgtcttttattattattattattattattttttaaaattgataattcttgggtgtttctcgcagagggggatttggcagggtcataggacaatagtggagggaaggtcagcagataaacaagtgaacaaaggtctctggttttcctaggcagaggaccctgcggccttccgcagtgtttgtgtccctgggtacttgagattagggagtggtgatgactcttaacgagcatgctgccttcaagcatctgtttaagaaagcacatcttgcactgcccttaatccatttaaccctgagtggacacagcacatgtttcagagagcagcgggttgggggtaaggtgatagatcaacagcatcccagggcagaagaatttttcttagtacagaacaaaatggagtctcctatgtctacttctttctacacagacacagcaacaacctgatttctctatcttttccccacatttcccccttttccatttgacaaaaccgccatcgtcatcatggcccgttctcagtgagctgttgggtacacctcccagacggggtggtggccgggcagaggggctggctcctcacttcccagaaggggcggccgggcagaggcgccccccacctcccggacggggcggctgccgggcggagacgctcctcacttcctggacggggcggctgccgggcggaggggttcctcacttctctgacggggcggctgccgggcggaggggctcctcacttctcagacggggcggctgccgggcggaggggctcctcacttctcagacggggcggctgggcagagacgctcctcacctcccagacggggtcgcagccgggcagagacgctcctcacatcccagacggggcggcggggcagaggcgctccccacatctcagacgatgggcggccaggcagagacgctcctcacttcctagatgggatggtggctgggaagaggcactcctcacttcctagacgggatggcggccgggaagaggcgctcctcacttcccagactgggcagctgggcagaggggctcctcacatcccagatgatgggcggccaggcagagacgctcctcacttcccagacggggtggcggctgggcagaggctgcaatctcggcactttgggaggccaaggcaggcggctgggaggtggaggttgtagcgagctgagatcacgccactgcactccagcctgggcaacattgagcactgagtgaatgagactccgtctgcaatcccggcacctcgggaggcccaggctggcagatcactcgcggttaggagctggagaccagcccggccaacacagcgaaaccccgtctccaccaaaaaaatacgaaaaccagtcaggcatggcggcgcgcgcctgcaatcgcaggggttcggcaggctgagacaggagaatcaggcagggaggttgcagtgagtggagacggcagcagtacagtccagcttccgctcggcatcagagggagaccgtggaaagagagggagagggagactgtggggagagggagatggagaggggagaggggagagggagcttatttactcattttaaaatttatttttagagatggggtcttgctctgttgccgaggctggagtgcagtggcacaatcataactcactgcagccaggctcactccccagctcaggctgtcctcctgcctcagcttcctgagtagctaggactgcaggcacatgccatgacacctgggtaatatttaaaattttcttagagacagagtctcactatgttgcccaggctgctcttgaattcctgggctcaagttatcctcccacctcagcctcctgaatagctaggattacaagcatgagctatcttgcctggctctggttcttaaaccttggaggttccatttatatggttgtatttctttttcttttctttttctttttttttttttttgagacagtgtctccctctgtcgccaggctggagtgcagcggggcgatctcggctcactgcaacctccgcctcctgggttcaagcgattctcctgcctcagcctcccaagtagctgggactacaggcccacaccaccacccttggctaatttttgtatttctagtagagacggggtttcactatgttggccaggatggtctcgatctcctgaccttgtgatcctctcccctcggcctcccaaagtgctgggattacaggcgtgagtcactgtgcccagcctgttgtatttatttttctagattacagttaattttgttttcatttcttgaaacctagtagaatatgtatctgcctataattcaagggcaattgaaagaaagaaaaataactcaaggccaggcatggtggctcacatctgttatcccagaactttgggaggctgaggcaggaggatcatttgagcccaggagttcaagaccagcgtgggcaacataatgagactctgatgctacaaaaaacttaaaaaaaaaaaaaaaaaattaaccaggcatggtggcacatgtctagctacttgggaggctgaggtgggagtattgcttgagcccaggaggtcaaggctgcagtgagtggtgattgtactctgcacagtgaaaccctgtctcaaaaaaaaaaaaaaaaaaaaggaaaagaaaaataatgcaagttcagcatatgatttagcaaaaccatttttgatttctctttgagagagattgtaacttgaatcctccttttagtggggagaatttaatgaatattttacatttcagtgtaataaaatgtgtccaacttgttacacaagacttagtttaagattcacatgtttgggaagaatgtgggtttgagtggtgagggttcagttgaaggtctctttctataaagtatataatttgttgccaaaggaaatattacctagcagcagtttacatgtgccaagagaggacagagaagtcttatagtagaaattgtacagaggagctgtcaaactagatccctgaggatgtcagacaggaaataaagcttatgatgctaaaaaattttactggatgactaggccattggaaatgaatcttccaatgcttgtgttttttttttatcatgcttttatttgaaaacagttacttacacttacaaatttaaactgtttaaggtatttagaccaaaatttaagaaactttataagatcttattggctaaatattgacttaactatatatatatatatatatatatatatatatatwtwtttttttttttttttttttttttgagatggagtctcactctgtcacgcaggttggagtgcagtggtgtgatcttggctcactgcaacctccgcttgctgggttcaggtgattctcctgtctcagcctcctgagtagctgggactacaggcccgcaccaccacacccagctaatttttgtatttttagtagaaacggggtttcaccacattggccaggctggtgtccatctcttgacctcatgatctgcctgcctcggcctcccagagtgctgggattacaggcgtgagccaccgcgcccggccaactatatctttttcttagaaagtgtttatcctctgagattaaggtttggaaagttataaggagagagactttaggttcttggagataaaatatagtaatgtaagcaatttccttctctatgccaaacgtggaaatacagacaatatgtataagcaattgtgccaaagtatttatctgtggttctctttattcctaaaatatattgcccatttctactatacacattcagatacactgtacagaattatagagatttggaacctgaaggactttaaagaacattcaaatttctttattttgtggagaagggacatgagacaggtaacattaaactgataagaacagatactacacttgatcttggccaaaaggccaagaagcgataggtaacataaaaatacagatagtttgcccagtatcatgaagggaataggagcagacttagctcttggagaaatagaatctttccttatttactgttgcagtaatgagttatttgaatttttatttatttattttagagacagggtctcactctgtcacccaggctggaatgcagtggtagcaatcttcctgcctcagcctcctgagtagctgggactacaggggcatgtcaccatgcccagctaattcttaaagttttttttgtagagatggggtttcactatgttggccaggctggagttgaagttttagaggtacatgatggctttggttttcttaccaccagatgatttatgaaagttgatgtatcagttgactgtcagcagaagtgaaaaactgtcaagcccctttgaagactattattattcaggaaacaaaacagtgttgacactaaatttttttttttttttttttgagacagggtcttgctctgttacccaggctggagggcagtggcattatctcagctcactggaacctccaccttgcaggtttaagctattctcctgcctcagcctcctgagcaggtgggattacaggtgcccactgccatgcctggctaatttttgtatttttagtagtacattaccagtgtagtttgtttgtttgttttttgacaaacaaagggttttgagaaagatggagtttcaccatcttggccaggctggtcttgaactcctaatcttgtgatccacctgcctcaccctcccaaagtgctgggattacaggcctgagccactgcactggcctttttttttttttttttttaaagtaaaacacaggatcagaaatctctttgttttgcatcatttgtgcaatatttgttttgtttgttttttccttaatgtcttgagagccagcaaagattatctgacagacagaattagactgaaatctcttagggaggttgtgaagtatttagagttaaaggctagagttaagaataagcagtggcaaaggtataactataaacctcaaagtgttactgacttaggattcattcatgactcttctgcattaagattgggagttaacttttaaaaactaggtacctccgtgaaacatgtatgcatcttactggacactcctttgtcgtttttccaatcacttctgccagatgggttttaatataataggaagaattgttacgatgtcagctctgttgtaatttggactggaatgattctgttctcttgtgaacttgaagagtccagttgaatcactttctagttattgtctttatttttttattgtagtttttaagtgtttgtttctacttgtggtaataatcctgttaggatgcatattaccaactatatgtgaaggcctggctatatggagcataaaattagatatgcttctttcctttggctcacagtctaaatttagtaggtgagagtttcctttcctagatgtcattaaaaatagaagatacccatctgtctggaatgggttagatacacttctccctacaggctgagagatgaattatataacactaacttccttttagccctaggattcttagaaaaaaatgtttctcttttaatacagaggccaagagtgtatagtttgaatgttaaccttaaattatcctataagtttgtgaaactcaggaagtcctaagaaaattgaattttgaggagaaatcgaaaagataaggtgaaacaacatcacttgattaagaaattggctttgaggtaaaatctgttcccagccctagatttacaatttactagctgtgtaagaaagttgtttaacctgagactgtaacttcattattgtggttggaatagtaaggaccgcttgttgaggggcaaattaaatgagtgaatatttataaagtgctttcttcagtgcttgggatgtaaaagacatttctggtggtggttattactgttaatgttaatattacttctggttctttttattaaaaatctgccatctcactattaaaaatcttaatttggagctcaggatagaatatgaggtcagagttaaatagggaattcctaggtgtatttggagtcctggaagtcatttagaggaggactgaaaaatcatcctcaaaggactacctgtgttagtggatgcagaagaaacaggaaaacagactgcgagaaagccatcaatgaggtgaaaagagaaccaggggaatgatgtcatgggattcaagagagagattgctcactgggtcagaaagtttcttcaggagttcatttaaaaatattttcagcactaggtgatgtcaggtagggaaggcctctgaggaaaccattgaactgggcaggtaagaggtcctcatctttgagagagtggaaaaatgactgtagacctagacttgattaggcagagaaggaaacaagcagtgaggaaaagcagagggcaggtgtctaagatggaacctcatgaaaatttagctgtatagagaaagagagagatgacttaagggagaggagaaggtgtttgggtagggctgggcgcggtgcctcacgcctgtaatcccagcactttgggaggccggggtgggtggatcacctgaggtcaagcattcaagaccagcctggccaacatggcgaaaccccgcctctactgaaaatacaaagattagctgggcatggttgcggggtcctgtaatcccagctacttgggaagctgaggcaggagaattgcgtgaacctgggaggtggaggttgcagtgagcttagatcgtgccactgcactccagcctgggcgacagagtgacactccatctcaaaaaaaaaaaagtgggtttgtttgtttcattttggtaagagaaaaaattggcatgtttgaaggctgagggagaggttaaacttactgggcagggagtagctgatggtgaagttgtggtcagaggcaagtgggactggaatccagtgcacaggtggtggctggaggagcagctgatctttatgaaagaggaggactgagggagggtaagtaagatagaggctgcaggggaaaatgaggaaattcatgtctaatggcctcttaccgatttaagtagggaaacggtaatgaactcatcattgggataattaggatagatgaatagatccttttctgctgctaaataaataaaagtagacttgggaaaaaggaatatcattattttcctatggaagcatatattaaaacattagaccaatggttctcaactgagagtgattttgtcccttgggacatttagcaatgtctggagacatgtttgtcaccgacgtggggtgtgttactggtgtctagtgtgtggaggccagggatgccgctagacatcctgcagtgcacaggacagcacccacatcaaggaatgatgtgatcccaagtgtccatagtgttggagttgagaactttgccctagaccagtatgtgcctacaacatacacttcaacaaaagctaagaagttcacataacagcttgatgtctctatccccttgtggaaagtcacagtatatgtttagtttattcaagtctgaaaaattctcaaaaggaaatctaaactgtttagctgactgacattttccctgctctttcatagcaactgttaacaaacacactgagaaatacatttagggggaaaggatgtacttcagtctcttggctggtcagtactatgtattcatccctgtatttctagtgtctgacacagttcttggcatattttgtggtactaaattgactccagcctataccattcccctgaactctagactcaaaattccagctgcctgttctgcatttttgctcagatgtccagtagcttctcaaccctaacacttccaaagtggagctcctaatagacctcccagacatgtctggaggtctcatcttagtcagtggctattccatccttccagttgctcagatcaaaggccttggagtcattcttcaccttgtcttatcctctgcattcccatccattggtaagtctcagctctatctctaggaaatattcagcatttaactattttccactctctctactgatttaaactgtggcctgagttgttagagcagtcttacaactggcttccctgcttccgttcttgtctcccaatacagtagccagtgagatccttttaaaatgtcagtcaaatcacatcactccttgttcaaaacgctccattggctcctcatttgcttcagtatacaagctgaaggcttttcagtggcctacatggctgtgcgtgaactggttcttcagtatgtctctgacctcttcccctcctcatcaatctgtgcctggttccacttcagtctcagttgggtttgttgttgttgttgttgttaagagatggggtctcactgtgttgcccaggctggattcaaactcctggactcaagcagtcctcccttttcagcctcctgaatagctgggattgtaggcatgcatcaccgtgcccagctcagtcacagtttttagttcagtgttttgctgttgctcaaacacatcaggcaagctaactcggggcctgtgcacttgctcttttctctgcctagaataattttctaccacatttccctcacggtttattctttcacctccttcaagttatttttgcttagatgtcatcttagtgaggtcttttgtgatcagcctgtttccaattgcagctctttgtcccctttgtctgcttgctttttctccagagcacttatcaccatctaatatactatgtaatttatataatttgtactgtctccccctactagaggtaacttattttagtccaagaacattttatgtgtgttttgctcattactgtgttacctgcaatttgaacattgcgtgacatgtaataggcctttaatgaatgattgttgaaagaatgaatagtgattaaagcaaaggctctgacttagaaccgaaattgagtcctggtgctggcactcgtctgctttgtgatcttaggcatgtcattaacctatctggcctgcttactcttctctgaaatggagatagtagaaccaagtaggtttgtcttgaggattcaatgcaagaatctgtgtaaagctctcagctcagaatctggtgcataataaacagtcaataagtgattgcttttattactactttttcttcccttccaatgtgaaaacctgggccacttctgacatatatgttgcaagttgcaattctaagctaaatgttggcaatcaccacaagagacaagagctacttctcatagatctgtagaatacactgatatttgtgctttaaaatcttacattaaagtatggcagttccttaaaaaattaaacatagagttattatatgatccagccactcaacttctgggcgtgtgcccagataaattgaaagcaggtacttgaacagattggtacaccaaggttagtagcagcattattcacaatggccaaaaggtgcacacaacccggatgtccattgatatagatggacagataaacaaaatgtgttatatccatacaatgggatattatttagctataaaaagcaatgaaattctgacacatgctacaacatggatgaacgttgaagacactatgctgaatgaaataagccagacacaaaacgacaaatatgattccacttatacaaagtacttagagtagtcaaattcatagagacagtagaatttaacacctgttactgacagacacatgatttcctcatattcattactcactcaaagtctggaatgttcaaggccagccagagcctaagccaaagtaccagtgataattcttatgttttgcttaaacataaggtktgtatttgtttttctttgaaggatgaaaagctgccgtctgtaatcctagcactttgggaggctgaggcgggtgcatcacttgaggccaggaggtcgagactagcgtggccaacatggcaaaaccctgtctctactaaaaatacaaaaaaattagccaggcatggtagcgcacatctcatctactaggcgggctgagtcacaagaatcacttgaacccagaggcggaggttgcagtgaactgagatcgcactgctgcattccagcctgggcaatagagtgatgagatactgtctcaaaaaaaaaaaaaagataaaaagtgatttctttcataacaaaattctataggaattacatcatgcttagtttaatttggggaagtatctgcatatatattttctctattttttcctggatatgaatatgtattcttaaaattcctaaaggatgccaagaatgtagctaacagtatcagaaataaacttcaaggaagtgtttctctacatctcaacaaaatcacttctctatatctcaacaaaatccctacaagtaaatctgtttttaaaatttgtctcaaaacatttgcggtaaagacaattttggacacacatctaattttttttttttaatctgtgattttgccaattgagaagaactggaaacaggagggagaattttgatgtcgtagatgttcttgttgattaagggataagggcacatacagacaaacccaggaattatctgacttcggctaaaacaacaacaacaaaacatctccagtactagcctgagtaattgcttttggcataatagctgttacctcagacagactgaaagtttaataactagattggagacttccctttgcagttcacaaataggaaaaacaccaccacagaagttctgtcacacatctgacccccttcgattcttaatttacagtgtgactgcatcttgcagccatgccccatcttagcattcttaaattataatgttacaggttattggcctgccaaaatgttcgatatgtaacattgaacagttccaaatgagatgaaaacaatcttgttactcatgagagtttgttttttctaggcttctgtttcattttatgcaccagtatagtcattttgtggaaaataaaggttacactgctttattaagtctcttttataattgtaatccagatttaccatccaataagagataacattgttatattttctgtcatgttctaaatatgtgctgggcatgatggctcacacctgtaatcccagcactttgggaagccgaggcaggaggattgcttgaggccaggagtttgagactggcctggacaacatagcaagacccagtctctccaaaaaataaaaaaaaattatccaggtgttgtggtgtgcatctgtagtcccagctactgaggagattgaagtgggaggatctcttgagtccaggagattgaggttgcagtgagctatgattgtgccactgtaccctagcctgggcaacagagtgagaccctgtctcatatatatatatgtgtatatacacatatatatatgtgtgtgtatagatatatatatacacacacacacacatatatatattcttatatagatcagaatttatatacatataagaatattcttagaggaatattcatattcttgtatacattcttatatatgtaagaatatatacatataagaatatacattcttaaataatgttggtgttgaaatattgaagtttccattgctattattttaattcttgaaggttcacgaaatatctgtaatctttcttccttgaaatatatatttcaagcaacatatccttctgaaatatccagaatgcattttgccagtaacaaaagaatattcttttgaaataccagacttgtaatgggagttagagaaatcttcctacttctttctcttcttcctgcctttttaaatcacaaaactgtaagactatcctggtatttgatataaattttatttgtatataaaatatttaaatattttaagtattaatatattgaagattacatatatctgtgtctatatctatttcaggcctttaaactctttggggagttcaaagaactagaaaaaagaatgatttaatttatttacttttttttctaaattattactttttccccgagacggagtctcactctgtctcccaggttggagtgaagtggcatgatcttggctcactgcaatctctacctcccgagttcaagcaattctcctgtctcagcctcctgagtagctgggattacaggcacacaccaccatgctgggctaatttttgtatttttattagagacagggtttcaccatgttggccaggctggtgtcaaacttctgacctcaagtgatctgcccacctcggtctcccaaagtgctgggattacaggcgtgagccaccgcgcccrgctaattttttaacttttaacaaattttgcattgtttctttttggtattcctagaagtaattgtatacgtaatataatctttcttttctcattgatgagtagaatgataggagtgaatcaaagaagtttcctaccattttaaaattctttccctacttctcaaaaaaaatgtgtttgatatttatttaaacgttaagttataggcaaccatgtatcctggaaaatagtcaggagtatatatattttactgtcatagratgtggtccatgcaatactttaagtgaataaggccagttgcatagtttatatcatataatttcattttcgtttaagagaaccacatgtttgattatgcaaagacaaaggtttggaaaggtgtacagttattgagtgtgataaaccctgggagaatgggatagaggcagggtactgcctcaggttgggttccccagaagcaggagttgagataaacttttatgggaagacaacttactgagaagagtttcagaaaaacctgctagggagtgggaaagtaggactggggacaggaagaggaggctggtatcaaggatgtgataccaagaaagcctcaaggtagacaactttggctagtcttgcaagggagttctggagcttatacctaagagttgtcactgccagggaccaaagaaataaagtagagcctttatactttcatacccatcagtaattgctaaggaccatccctggtggggaggtgatatggtttgcctgtgtccccacccaaatctcatcttgaattcctttgtgttgtgggagggacccggtgggaggtaattgaatcatgggggcaggtttttcctgtgttctccttgtgatagtgaataagtctcacgagatctgatggttctgcaagggggagttcccctgcacaagctctctctttgcctgctgccatccatgtaagacatgacttgctcctccttgccttctgccatgattatgaggcacccccattaaaccctttttcctgtataagttacccagtcttgggtatgtctttatcaacagtgtgaaaaacagactaatacaggatgagtgtataaatgtccaggaagtgctggcagactgagggtagcccctctacaaagacctgcaggtgctggctgttgggagtgagagcacagggttgggaggaaatgtgggcagagcactgacagcagttgtagccctcacccaagttacagagattttaaaaagattggggtttaattctttctcagtttaagcctcccagggcctttatggtggctccacagagatccaggctccttctattcttttgttttgttttgtttttccaggcttcttctctcttgttgctctctcatcactagcttattgcccacatccacgtggtccaagatgctcaatattatgtccatattcccattagaaaaaagggggaaagtcaggaggaagagagcacattaattcctctaaggacaagttctcaaagttacatcacttcacctcaaatcccactggccatcatttagttccatggccatacctggatgcaaggaagactagtgtttattatggttggccttatgcccagttaaaaataggagactctgttattatgtaatcatttctgtagaaggagagaacacgtattgtaggactatctattatagggatgttcattttctgttttatagggatatgctttgttttttagtttaataagcatgtattttttgtcttaactatcacaggttaggggctccagaaagcagaatttgagacacaacttaatgtgcagaatgttaagtagtgctcttctgttcaactcctgtggaagggaagaagcaagatttggcagggagaagttgagctgtggtacactgtgaacaacaggagctgactccacagggagctctggagctaacgtggacttttagagttgccctgctttgagcagaaatggctggaccatttatacctttgtctccgttggttactggatgagggattgtcttgggaagcacatgaccttgggcaaggtagctctgcagaggtaatgtctacaggagctgacagtactcccagcaagttctttcttgaagggagagctgggtgacacatctgtttgtctgtcacaacttcgtgtgtgaaagtaattaatacattttatgtatctattttataacttaaaaatttataatttaaagtttcttttattcctttatcagtagtttcttgtgtaactattagtactgggctttattatagacattggagatagggaaatgtccctcccctcatgaagtttgcattatatttggagatagataataaataaattttggctgggcgtggcggcttacacctgtaatcttagtacttagggaggctgagacaggcggatcaactgacctcagaagttcgagaccagcctgggcaacatggggagaccctgtctctatagaaaacacaaaaagtagctgggcgtggtggtgtgagcctgtagtcccagctacttggggagctgaggcggaagggtcacttgagcccaggaggtcgaggcttcagtgagccgtgttggagcccctgcacatcagcctgggtggcagagccagagtttgtctcaaagataaataagtataaggaagggtgttgctgttttatatggggtggtcagggaagaccagaaatgcaataagatgatttgagtgaaatgatggaactagctctgcagatattttgggaagagcggtccaagctgagattacagtgaattccaagacaaccctgtggcaggaatgtgtagagtattggtgtgtacatgaaacagcaaggagagcagtgtggctagaatgaatgagaatagtaggatgaagaataataggagataaagtcttggatataatagtggtgatcagatcatatgagaccttgtaagccattgtaaagacttggggatcttctcagaatgagatgggaaaccatgtgaagattctgagctaagtgatagaatttgacatattttaaaagatcatcttgtctgctgtgtttggaatgaactgtacccgaacaactggaaaaatggagttgctccaaccgagaaggggaagactgtgaatagagtaggtttttggggtgaatagttgcaattaagttttgtatctgataagtttggagtaccaatgagacattcagatagagatgacaaatagaaagttagaaagtggagactggaattcaggggagaagtccagtgtgtagattaaaaaaacgtaggtgtcggccgggcacggtggctcacgcctgtaatcccagcactttgggaggccgaggagggcagatcatgaggtcaggagatcaagaccatcctggccaacatggtgaaaccctgtctctagtaaaaatacaaaaattagccaggcgtgtcagtgtgtgcctgtagtcccagctactcgggaggctgaggcaggagaattgcttgaacccgggaggcgaaggctgcagtgagccaagatcacactgctgcactccaacctgggtgacagagcgagaccctgtctcaaaaaaaaaaaaaaaaggaggtgtcatcagtgtccagttggtgtgtaaagccatgaaaattcacactgtcacctatggaatgagtggagaagagaacatctcagagatttgagctcaggaacactccaacatttccacgttggatcatgaggtgaaccatcagtggaaactttgagaaggagcagcctgtgaagtaagaggaggaaatgatttttttatttttgagatggagttttgttctgttgcccaggctggagtgcagtggcatgatcttggctcactgcagccttcccctcctgggttcaagcaattctcctgcctcagcctcccgagtagctgggattacaggcgtgcaccaccatgcccagctaatttttgtatttttagtagagacagtgtttcaccatgttagccaggctggtcttgaactcctgacctcaagtgatccacccaccttggcctcccaaagtgttgggattataggcatgagccatcgtgcccagccggaaatgatgttttagaaggcaaccaggagtgtttcaagaagaggaaaatgatcaacagtgtccagtgctgtcgataagtaacataagatgaagactgataattaccctttggatttaccagtatggaactcattggtagtgacaagcagtgattcagtggaatgatgggaacaaagtgaattggtgtgtgttcgacagagaatgggggatgaatgggagacagctctatagacaagtcttctaaagagttaatgctgtgaaggagagtagagaaacagcatgaaggctagaggagcatgtgagctagaaagaagagttttaaattggaagctaatgcaccctgtttgaatgctgatgatagttatccagcacagaggcccattggtgatgctgcaagaagagaacagttgatgggctgatgtccttgaataacagtgagggatgtgaaggttaaggcatgaatggagggcttggccttagatagtaacatagttcaatcaagataatagaaggaagacagaataatatgtgtggctacratagcaagtagatggtacattgtggctgggcatgtgtggaggatctttactgattttstctggtggttttttgttgttgttgttgtttgacagagtcttgctctgttgcccaggctagagtgtagtggcgtgatcttggctcactgtagcctccgactcctggattcaagctattctcctgtctcagcctcccaagtaactggcaccatgcctggctaatatttatttatttatttattttttagtagagacggtgtttcaccatgttggccaggtggtcttgaactcctgacctcaagtgatccacctccctcggcttcccaaagttctgggattacaggcatgagccaccatgtgcagccaagcctgatttttttttttttttttttttttttttttttttttttaagagacggagtcttgctctgtcgcccaggctggagtgcagtggcgtgatctcagctcactgcaagctccgcctcctgggttcacgccattctcctgcctcagcctcccaagtagctgggactacaggcgcccaccaccacgcctggctaatttttttatttttatttttatttttttatttttggtagagacggggtttcatcgtgttagccaggatggtctcgatctcctgacctcgtgatctgctcgcctcggcctcccgcagtgctgggattacaggcgtgagccactgtgcccggcccaagcctctgttttttagtgaaatataaaacaattgccatcagctgaaaagtggggatggcggatgagatgttggatgtttgaggagagaagagaaagtgtgagatagggctctggaaagtgaagagtgagtggactaggaatgtagtggaaatgcccattctgtggtcatgctttgaaagtgagatcagtcagcatgattatgtgtatttcttcagccctatttagtagcccaggtgcaagcatggagtaggtagaatgttggatttaactgagtgataaataaaactaaatattcactttgaaagctgtttttaggaggtcggtgatgtgaatggtatttagaattttagctttttaattatacccattttggaaggctaaacttagtgartgacaggtcattaaaaaagcaaaaaagaaacggcattgttccaggaaaggttcttggttgaaaattacagaccttaattccagccaacttaagcagaaaatgaatttattggaaagttgtcaagtacctcacagcatggatggaaagactggagaatctggttcagaaaataggcaagaaccaagggaatccaaatatctgtaatcatggctgaagtcatgcccctaggggagtctggttccggatgctgttgccaccatttttgaaccctggtattgcatctgttggagtgagttatgaacctgtcctttcttttttttgagacagagtctcgctttgtcacccaggctggagtgcagtggcgcgatctcagctcactgcaagctccgcctcccgggttcacctattctcctgcctcagcctccggagtagctggaactacaggcgcctgccaccatgcccagctatttttttgtatttttagtagagacggggtttcaccatgttggccaggatggtctcgatctcttgacctcatgatccacctgcctcggcctcccaaagtgctgggattacaggcatgagccaccgtgcccagctaacctatcctttctcatttgagccactggctgcatctcaaaaacctctaaaaagattactctgaggccaagcatggtggcacacccctgtaatcccagcagtttgggaggctgaggtgggaagatctcttgagtccaggaggtcgctgctatgtcaagaatggagtataggagtgtaagagtagatgtggggagaataagtcatgaggctccaaaatagatgatattgacttagattaggatagtgacagtggagatgaaaagaagtggatagattcatgaactagcccattaggctgttgttaaaattcttgtttagggaaaaattccttccttctcccctgccccttccttctccttcttcatcatcctccttcctcttcctcatctctccatcgctccttactctttcttcctcctccttcctcatcatcctccttcctcttcctcatctctccatggctccttactctttcttcctcctcctctctcctccacatcctccctcgttttcctctccttcctcttcttcttatctacctcctcctttcttgaaatctagacctttctagaggccttttacatactcctatcttgcataaggcagagtaacttatctagcagatattttataaaatcttgtagtattcatcatttgttaattaagaaaatatgcctagctcctagtatgtatactattgtgctgaagggggttgttgtagtcatttcagaattgagttcaagtctagacacacagaaatggtttatttcttctagggcactacatgcttgctgtctaggctaaccttttttctaggtgtgggtaattgagaatacatgatctaggtttcacctcaactttatttcccagcactcattagttccttattgtagtcatttacatatctgttattggaaatgggccaaatgtttatccattattttaaaaataataagaaaacaggtatctttttttttatcttcctaagacggtgaaggctagctactcagagactgccatgggaggatcacttgagcccaggagttcaaggttgcagtgagctgtgattgtgccactacattccagcctgggtgacagagtgagaccctgtctttctcttaaaacaaaacaaacaaacactgcccccsccaaccccaaaccaaaaaaaaacccagctagattactgcctcaaacttaatgtgcacacaagccatcttgaaagcttgttgaaatgcaaattctgattttgtaggtctgaagtggggcctaagattctgcctttctgttaagctctgtggtgatgctgatgctgctggtctatagatctcattttgagtaacaagaaactagataatatcctttgcactttcatctttgtatgggttattctgctttggggcatgttttggagctgtttaatttgaccacaggttaagtagtacattttaagaagattgaattgtataaccttttcctgcttttttgggccatattcttgaaggttataatactataaatagcttaagatttttagtttcagctttggaaatagatgaagagaagtctcagaagcagtataatttttattgaatcattaaatttgcagcagcacaattggtttatctacttgaggtagtctgaactacaagtagagtattagtaactgaattaagaataagaaaagatacaatgctgaaaatcattattagatatgtagaatacagttaagacttggggagtttctgttttgtagggttgggaatgttttggataaggtatatggtatatcagcactgggcttcttagctggggcgatctgcctcccaagacacatttggcaatatctggagatatttttagccgtcaaaacaagtaggggggtgatgcaactggcatctagtgcgtagaggcgagggatgccgcyaaacactctacagtgtaccagacaacccccacaacaaagacttatttggcccaaaatggcaggagtgagaaggttaagaaactctatgttagggagttttcaaaagcactttatttttaaaattaaaaataatacatccaggcatggtggttcatgcctgtaatcctagaactttgcgaggccaaggtatgaggattgcttgagcccatgagttcaagaccagcatgggcaaaatagcgagaccccatctctacaaaaaattaagatattaggtgggtgtgtgcattagtttgttttcacattgctataaagaactacctgagactggataatttataaagcaaagaggttaagttgactcatagtactatagcctgtacaggaatcatggctgagtaggcctcaggaaacaatcctggagaaaggcagaggggaagcaggaacatcttacatggctggagaaggaggaagagagaacagtggggaggtgctacacacttctaaacaaccaaatcttctgagaacttactatcaggagaatagcaagggggaaatctgcccccatgatccagtcacctcctatcaggcccctcctccaacattggggattacaattcgacatgagatttgggtggtgacacaaatccaaaccatatcagcatggtggtgtgcatctgtagttccagctacatggggtggtgaggtggaaggattggttgagcccaggagtttgaggctgtcatgaactgtgattgtgccactgcactccagcctgggtgacagtgagaccctgtctcaaaaaaaacaaaacaaaacaaaacagttgagaccattctattgacgtatcaacaaaaactttttaaatgaaamattttaaatttacagaaaattaaatagaataattaatccccacattctcatcacctaacttcaacaatcatgaattgatggccagttatatactttacgtatattatatctataaatttgatatatttgtgtatatccacactcacctaaccctgagtttttgaagcaaattctaggtatcacatcatttaatctgtaaatatttcagtatgcgtatttaaaacatgaggactctttttgagccattatcacacacataaaattaccagtttccctgattcattatctcttctctcttgttttcttccaaatggatttttttgcttttaatgagatttcacataatgaaagagcactaattttacaaagcaatggaaattgatgctacatgggccaaacaaaagctatctgccgcaagtacttttttctaattatttttctagaatgtctttatttgtttgaaagtgccgtgtaaaataatgcaatactttctcttttctactgtgtctgttttacaaatcgcctttttcatcttccccagtattttctgagttatcttcaggctttgttatatttgctatagcaatggcctctggggactagttactacttactagctagtacctgcaggaatcattttcttaactggtggtgagcttcttgagggcaaggaccaagtcttaccaactttctgcctgataaccattagcatgtcctcaatatttgttggatggctgctactaatcttgagggcatcatgccaatattgactgatgtatcaatcaatgctactggcrtgtggtatttacagcaaaaaactaagtgtgctcatttagctataacatgtctttagcagaagagataagtcagatgttaacatttgatacctgcatctatgggaggtgaagtagagaatgctgttttctctagttacattcctttgtttcttcttacacttatttatagggtgaccatatgtcctagtttgcctgatacagtctggktttccaaagtctaatagtgccccttttcattcacagaattgtcctagtctaggtggtaaattaaatggcagtattacttacataacatttaatgtatgccagactctcttctaaacactttacatacattctcacttaatcttcatgataaccctgggaaacagtttctattattctacccatcttacatatgggaaagttgaagcacaaagaggtcaagtgacttggctaaaatcatgcagctgtatttgaatagtaagtggyagcaccaggattgagtgcaggctgtttgacaccagtgctcttacccacgccactcttgcccctatgctggtcccaaatatatctgtctgcctctgtagactacattttgatctattaagaatctcctgataattaatctgcatatttttagatcagcagtctggctaaggctttggaatttgaagggtttcctttgttttcacaaaatccttatagattctacatgtaccactaggccaatccgattatagtcttctttctcagaagaytgaatggtgaccttttttcatctttgtaatgccagctattcagcattccctctgagaccctccagtgatgaggtttcccagcatttggagagtatcaagtccctgcctcagtcacttttccttatctctgaccacctgtggtagctgaagttctctttccagcacctggaacagtggcagccatagagcaggcacacataaactgtttcactgcctttgattagtgcatattttggagttgcctggaaacagtgttcaaggcacttacataaggtgctttaagtaagaggttattgtaagctactgctttcaagtagcttacaatttaggaaggggatgacgagtgtacacaaataactatgatatacggcaattgaactatataagcaaagtattttaagagttcagaaaaaaacaaattgtttctgacaggagtgatccagaaaagtttgatagagatggtggtactaagtcagtttaataacttttaaattggctaaaaaattactgtctacttatgtttgctaagggtagaggcttgacagaagaataagacttgatgaacctccaggagaagaggatgtgtcagcttgacacttggtcctcttgggaggaatcctcagtcagcagtcttgctcggtttttatggtatcatcattatcatcatggcacattttaaccctctaggtggctcagatggaactttttctcagcagcaaagaattatcatatatattttgagacaaggtctcgctttgttgcccaggtgcgatcacggctcactgcattctcagcctcctgagctcaagtgatcctcctacctcagcctcctgagtagctgagactataggtgtgcaccacaacacctggctaagtttttgatggggactcttgggcttaagtaatcctcctgcattggcttcccaaagtgctgggattacaggcatgaaccactgcacccagtcaatatttttttaatgtagaagcctgatatgttatttgattttttttcttttttgagacagagccttgctgtgtcacccagagctggagtgcagtggtgcactctcggctcactgcagtccccgccctttgggttcaagtgattctcctgcctcagcttcctgagtagctgtgactacaggtgcacgccaccacgcaaggctaatttttgtatttttagttgagatggggtttcmccatgttggcaaggccggtctcgaacccctgacctcaggtgatccgcccacctcaacctcccgaagcgctgggattacaggcataagccaccgcacccgtctgttatttgattttatttttaaccttttaaagtctattgatgttcccaacatatttttccttaataaaaaacacagtctacttttattacaatgtaattacatttgcctttttaattggtagtaataaaaagtggttactttttaataggatttgtcacagtagtcagtaagataggatagttagtgctcattatcctccatacaaatgaagaaactgaaatttgataaaactgtaagctgcgtgactttggggaaaatggaacaattgggacctggacttgggtcttcagaattcacatccagtgtatgtatatcacatagccttatttagcttattagatttttaaaaaattttatcaagataaagaacaataaaagttgtggtgatctcatgttataacccctttttaataaatgtcattatagaatctaccttaacatgatgagtctgttttcatttctcagttgacaggcccattagcactgctttgatgattgtagacacaatgcattctacggaaagggaaatcctgaaggggttgcaggtggcctatatggttcctttgtgcaaattagaaaaaggccgcccctctaggggaaccagagtgctccctttctgtggtcagtcagaagaagcagctttggccccaggcaggatgatgagcttggagcatgggcatctggattgttgtctctgcttggcctcttttacgtagtgcttaaaaagcagcagccggccgggcgcggtggctggcgcctgtaatcccagcactttgggaggcccaggcgggcagatcatgaggtcaagagatcgagaccatcctggctaacacggtgaaaccccgtctctactaaaaatacaaaaagttagccgggcgtggtggtgggcacctgtagtcccagctactcgggaggctgaggcaggagaacggcgtgaacctgggaggcggagcttgcagtgagccgagatagcgccactgcactccggcctgggcaaaagagcgagactccatctcaaaaaaaaaaaaaaaaaaaaaaaaaaaaaagcagcagccaagagtcctgttcatattaactaatttgtgaggggctgggttaaaaaaaattttttttactattgtatttttagacagaccctctcgttcctccgtacaccaagtacatacctgcctcagcatctttgtacttgttcctctacctggaacctggatctcccagccttcatttcatccaggtctccactccagtggaactctgcaagcttcacctcgcctactccagtgaaagtatcaccctccgtcattctcccttcctgctgtacttttttcatagtacttcttaccacttggaatattatatttatcctcattttatttttgtctttcacagagtgtagaaagtacactctgtgaaagcagatatttctttcactgctttttcactgccatgttctagcacctggaaaaatacctggcacatagaagactctcaatatttgttgaatgattgaactaaccatgtgattactccattttcatgcagctgatgaaggctacctgagactgggcaatttacaaaagaaagaggtttaattggacttacagttccatgtggctgaggaagcctcaaaatcatggcagaaggcaaggaggagcaagtcacatcttttttttttttttttttttttgagatggagtctcactgtgtcgcataggctggagtgcattggtgcgatgtcaggtcactgcagcctccgcctcctgggttcaagcaattctcttgcctcagcctctggagcagctgggattacaggcgcacaccaccacacccagctaatttttgtatttttagcaaagacgaggtttcaccatgttgaccaggctggtcatgaactcctgacctcaggtgatccacctgccccagcctcctaaagtgctgggattacaggcatgagccaccatgcccggcctgcaagtcacatcttacatggatagcagcaggcaaagagtgagcttgtgcaggggaactcctctttttaaaaccatcagatctcttgagacttattgtctgtcatgagaacaggacaggaaagacttgcccccattcattcagttacatccgggtccctcccacaacacatgggaattcaagatgagatttgggtggggaagccaaaccttattctgcccctggcccttcccaaatctcatgtcttcacatttcaaaaccaatcatgccttcccaacagtcccccaaagtcttaactcatttcagcattaactcaaaagtccaaagtttcattcaagacaaggcaagtcccttctgcctatgagcctgtaaaatcaaaaacaagttagtgacttcttaggtacagtgggggtacaagcattggataaatacagccattcaaaatgggagaaattggccaaaacaaaggggctgcaagccccatgcaagtccaaaatccagcagggcagtcaaatcttaaagctccaaaatgaactcctttgatgccatgtctcacacccaggtcatgctgatgcaagaggtaggctcccatggtcttgtgcagctctgcccctgtgactttgcagggtatagtgtccctcccggctgctttcatgggctggcattgagtttctacagattttccaggcgcatggtgcaagctgtcagtgtatctaccattctggggtctggaagayggtggccctcttctcatagctccactaggcagtgcccmagtagggactctgtgtggggattccaaccccacatttcctttctgaactgccttagcagaggttctccatgagggccccgcccctgcagcaaacttctgcctgggcatccaggcgtttccatacatcttctgaaatctaggcagaggttcccaaacttcaggtcttgacttctgtgcacctgcagtctcaacaccatgtggaagcacccaaggcttggggcttgtaccctctgaagcaacagcccaagctgtacctcggccccttttagtcatggctggggtgtctgggatgcagggcaccaagtctctagaccacacatggcatggcgaccctgggcctggcccacaaaaccatattctcctagacctccaggcctgtgatgggaggggctgccgtgaagatctctgacattccctggacattttttccatagtcttggggattaattttgggctcctcgttacttatgcaaatttctgcagccggcttgaatgtctccccggaaaatgggtttctcctctctgtcacattgtcaggctgtgaattttccaaacttttatgttcttcttcccttataaaactgagtgcctaggaccaggcatggtggctcatgtctgtaatcctagcactttgggaagccggggtgggcggattgcctgagcctttaagatcagcctgggcaacatggtgaacctccctctctaataaaaaatataaaaaattagctgggcctggcagcatgcgcctgtggtcccagctactcaggaggttgaggcaggaaaattgcttgaacttgggaggcagaggttgcagtgagctgagatggtgccattgcactccagcmtgggcaacagagcaaaactacatctccaaacaaaacaaaacaaaactgagtgcctttaacagcacccaggtcacctcttgaatgctttgctgcttagaaatttcttccaccagtaccctaaatcatctctgtcaaggtcaaagttccacagatctccagggtaggggcaaaatgccaccagtctctttgctaagacataacaagagttgcctttgctccagttcctaacaagttccttatctccatctgagagcacctcagcctggattttattgtccatatcactatcagcattttgggcaaagccattcaacaagtctctatggagttccaaactttcccacattttcctgtcttcttctgagccctccaaactgttccaacctctgcctgttatccagttccaaagtcacttctacatttcagcaagccccactccactgttaccaatttactgtattattccattttcactctgctcacaaagacatacctgagacttgacaattacaaaagaaagaggtttaattggacttacagttccatgtggctggggaggcctcacaatcatgacagaaggcaaggaggagcaagtcacatcttacatggatggcagcaggcaaagagataacttgtacaggggaactcccctttttaaaaccattgggtctcatgagacttattcactatcaggagaacagcatgagaatgacttgtccccgtgattcatttaccttccactgggtccctcccacaacacgtgggaattcaagatgagatttgggtggggacacagtcaaaccatatcacagtggattgtgattgatggtataaattatcagctttagtatttactaccttttattgactgtttatgggcactttctgtgacataatgttatgaatattgtctaatggaatcttcataatacctttatgaggggtaaataatataaactctgttttggagttgaagaaatcccaaagctgagaaaakttaaaaacatgcccaaagtaaaatagctagtaattcaagtcattccttgagaggtagatctgataaccaaaatcaatttctaaaaattgttttagtgattcttttgggtctcataatatttttttcaaagagtgatttttaatcactgggtaggggaaagcctgaaaatacgtttacttatgttttaaggaaaaggaraggtaggatctatgggatttgaaatactgggataactcgggatcagacaaccctatttcacaatatttgtgtttttatcttaggatgcatactatgagggtcctttgggaagaagarcatgactttggggttttttttctaactgtgtaattctggagaaataacttacttaagcctgttttttcatctctaaattctggtgacagtgcctaccttataggtgtgtgcagatgatatgtatataaaatgcctggcatagtttctggagcgtgggagcttgatttcttctgtaccctgccccctgcctttttcttcctccttccagctacaagtgactaaggatccaaggaactgagggccgttttctttttttttgataacttccctctagttaaacaatcccagattttaagctgcttttggtagtatgtagacaatcaaggtaccttttagaattcacatggcatcttgtttattgctgtaattcaaggagtaattcatgtgctttgttaagtgttgtgcacatattcccttcacagactttggggtctaattcctgctttcgtaatcaaatgctgaatgaaaactgagggtcaataactgtctttatttcttacagccttctcctcatgttccgtgaaataccagtttttttttttaagtcaccaacgtgtttgccaatacatatgaatttggatgctaacagggatttcttaagcaccatcttgtaatttctataactgtcattgtgtcaacaggatagtagtgtcatttacagactcaaagactgggaattcttgaactaatgagttgttaattaaggtaggttaaaaaaaaaccaggcatttttatatgaagatactttctgtatgaaatttgattaggcagtatarcatttaactagtaagtgtgaaaaattatttactaagaagcaaagaacaggatttaaaagaagtacaaccaacttccagttatagatgtctgaggagccttttcaattatacgcagatcttctctcccttttaatatcctattatgtgccatataatgaagcaataaaaaggctcacaatttaagcattaatgattgatttaaccaaagatatataattattagcttacataaccccaaataatgatataattaacaataacataactaatgatggggggaggcactctgggagctataagagaacaaaatccttatttgccatttgcagaaaatctgtaatatcaaaaatagatgaatcaagcaattgcaagaaaagcttattatataggaaaatagaggaaacaattatcaaaatagatgaatatcagaaatagatgaatcaagtaattgcaagaaaagcttatataggaaaatagaggaaactattatcaaaatagatgaatatcaaaaatagatgaatcaagcaattgcaagacaagcttattatatacgaaaatagaggaaactaccaggtaaaacagaagaattgaaagttttttgatttttggtttttcttacattttagagacagggtctttgtctatcccccaggctggagtacagtggtacaattatggctcacttgaactcctgggctcaagtgatcctcttgcctcagattcctaagtagctggggctacaggtgtgcaccaccacatccacctaatttttagattttttataggagtctcactatgtttcccaggctggtctcaaactcccaggctcaagtgactctcctgccttggcctctcaaagcgctgggattataagtgtgagccactgtggccagcctaacagtgggaagctgttgatgctggcagtataggggtggtggggggaagggtgaaccagcagactactgtctttaagtgtttgtgggtaatgttggctttttttgagatagagtttcactcttatcgcccaagctggagtgcagtggcgtgatctcagctcactgcaacctccacctcctgggttcaagcgattctcctgcctcagcctcccgagtagctgggattacaggcatgtgccaccatgcctggctaattttttgtatttttggtagagatgtggtttcatcacatttgccaggctggtcttgaactcttgaccttaggtgatccgcttacctcggccttccaaagtgctgggattacagatgtgagccaacacgcccagcctaatgttgacttttttttgtttatatattattttgacaaaaataaaagttaactatgagaaaagaaaaatagaaatataagcaatccaaaaaagtgaagacaactcacaaaaaggaataatgtatttgcaaatcatttatctgacaaggtgcttttatctagaatgtgtaatgaactcttaaaatgaaataataaaaagaaaacccattaaaaaaatacaccaaaggctgggtacggtggcttacgcctgtaatcccagcactttgggaggcggggggggtgtggatcacttgaggtcaggagttcgagtccaacctggccaacatggtgaaacactgtctctactaaaaatacaaaaattagccaggcgtggtggcaggtgcctataatcccagctacttgggaggccgaggcacgagaatagcttgaacttargaggcagaggttgtagtgagccaagattgcaccactaaactccggcctgggcgacagagcaagactccatctcaaaaataaataaataaataaataaatgtcaagtatctgagtagacatttcttcaaaggaaatatacaaagccccaataaacacagaaaagccatcagggaaatccaaatctctctagacagataataacaagtgttgttgaggatgtggagaagtacaatacttcatacattgctgcatgtgtgaaatggtacattcactttggaaaatagtctggtagctcctaacagggttaatatagagttgtcagatgacccagcaattctactaggaggtatacccccagaagaaatgaaaacatgtctatacaaaatcttgtaggcaaatatttgtagcagtattattcatagtagccaaaaagtgaaagtctgttcatcacttgttgaaaggagaaacaaaatttggcatatccatacaatagagtattacaaggaaaaacaaatataaccaatcagttactgcttaaagaaaaagtaatttttctttctcctttgaggaaaagtttattcttttcttacctatcatgcatccactttattgtagacaaaacatgaaatstaggaaagcagaattgtgacggaatacatcatatgaccatatgagtggggactggctctgtcacccaagcctgagtgcagtggcgcttccaactcaccttcccgagtaggtgagactacaggcacacaccatcaygcctggctgattttttcatttttttgtagaaaaatggagtttctgctgggcgcagtggctcacgcctgtaatcccagcactttgggaggccaaggcaggtggatcacctgaggtcaggagttcgagaccaacctggccaacatggtgaatgaaaccccgtctctactaaaaatttgcattagccaggtgtgatggcacttgcctgtagtcccagctactagggaggctgaggcaggagaattgctagaaactgggaggcagagggttgcagtgagctgagatcacgccactgcactccagcctgggtgacagtgagactctgtctcaaaaaaaaaagaaaggaaaaatggtgtttcgccatgatgttggccagactggtctcaaactcttgaactcaaacaatttgcctgcctcgacctcccaaagtgctgggattacagaggtgagccaccacccagccatccatgtttccttttttctttctttctttttttgttttttggaagtgcaggccacacagttttgttttgttttgtttttttgagatggcttctcactccctctgtggcctaggctggagtacagtggtgcaatcttggctcactacaacctccaccccctgggttcaagcgattctcctatctcagcctcctgagtagctgggattacaggcgcgtgccaccacgcctggctaattattgtatttttagtagcaatggggtctcaccatgttgaccaagctggtctggaactcctgacctcaagtgagctgcctgcctcggcctcccaaagtgctgggattacagatatgagccaccacgcctggcccataagtatctttcaatgagttatttttattgttgttctgcttagtacagattaacccaacatttgatgactaacagccttctgtcagagtatgctgagatgttgctcgagtgtcccctcatgattttcatgttgtttgtatttatactacatacacagactgttggccactgttgctctcatctttgtatatgatcgatcaacaaggaaatgtctgttggctgggtgtggtagctcacacctgcaatcccagcactttgggaggccgatgagagtggattgcttgaggtcaggagttcgagaccagcctggccaacgtggtgaaacctcatctctactaaaaatacaacaaggccaggcgtggtggctcacgcctataatcccagcactttgggaggccgaggcggttggaaaacttgaggtcaggagttcaataccagcctggtcaacatggtgaaaccctgtctctactaaaaatacaaaattagccgggcatggtggcacatgcctgtaatcccagctacttgggaggctgaggcaggagaatcacttgaacctggaggcggaggttgttgtgagcggagatcgtgccactgtactccagcctggtcaacaggagcgaaactccatctcgaaaaaaaaaaaaaaaaaattagctggacrtggtggtgcatgcctataatcccagctacttgggagcctgaggcaggagaattgcttaaacctgggagcagaggttgcagtgagccgggagatcatgccactgacagagtaagtgagaagctgtctcagaaaaaaaaaaaaagaaagaatgaaacatctatgtggcctgcacttctttacagactaaatagaaatatagacctaatagcttgctgattggtgattgaggcttttgcctacatttcttgtttcctcttgagttttggtgttataaataaataaatggtgatttaaatgaaagtacattgtattttctgcctctgtgagttctctactggagacagtttgaatgaattgttaggagtaggcgrctttgagtcatgcttccttacatccgtctccagattcatattttggatgctttctttcattttgtgtatttttgtatttcctgccccattagcttcataaatagtcattccatgcatcttgtttgtatgtattgtttttagataaccaactaactggtccttagtttttcatcttttattttttttgagatggagtttcactcttgttgcccagactgaagtgtagtggtgtgatcctgcaacctccgcctcctggattcaagcgattctcctgcctcagcctcccgagtggctgggattacaggcatgcaccaccatgcctggctaattttgtatttttagtaggaacggggtttcgccatgttgctcaggctggtctcgaactcctgacttcgggtgatctgcccacctcggcctcccaaagtgttgggattacaggcatgagccaccttccctggccagttttttatattaataatataagagtttagattttattgggtttgtatttaaattagatcaagtttggatttgggaaccagcataactgcaagcctggaaatccttaggagattctatctgttctttgccactgagagaagtactgactattctgaaaataaggcagaatgaggccaggctcatgcgtgtaatccaaacactttgggaggccgaggtgggcggatcacttgaggtcaggagttcgagaccagcttggccaacatggtgagacccccatctctactaaaaatacaataattagccaggcatggtggtgcacgcctgtaatcccagctactcaggaggctgaggcaggagaatcgcttgaacctgggaggtgggggttgtagtgagccaagattgtgctgctgcactccaacctgagtgacagagcgagactctatcttttttttttttttttttgatatggagtctcgctctgtcacccaggctggagtgcagtggtgcaatcttggctcgcggcaacctctgcctctcgggttcaagcaattttcctgcctcagcctcctgagtagctgggactacaggcgcgtgccaccacacctggctaattttttgtatttttagtagagacggggtttcaccgtgttagccaggacggtctcgatctcttgacctcatgatctgcccacctcggcctcccaaaatgctgggattacaggcatgaaggcatgagccaccgcgcctggcaactctatgtttaaaaaaaaaaaaaaggagaacgagagtgcttagggaaattgagagcatttggaagaataggaagaatagaagcctgcagtctgtgagtgaaatgtaagggtatttgactaaccatacagggaaaagaaacctttcagagtgattaaatcctgtactcttcattttatttacacatttattttatttttatttttgtttttcttttttatctttacatgacattgaccaggctggtcatgaactcctgaccttgtataagtgtctttttgctgcataaacagagtcataggatagacattgctccaaagaagatatgcaaatggccaataagcaggtgaaaagatgctcagcatcacttgtcattagagaaatgcaaatcaaaactacactcattcatatggctgctatcaagaaggtataatagtaataaatagaaaataacaagtgttgagaaacatggagaagttggagctcttgtgcattgttggtgggactataaaatgatacagccactgtggaaaacaatatagcagttcctcaaaaaattaaaaatagggccgggcgcggtggctcacgcctgtaatcccagcactttgggaggccgaggcgggtggatcacgaggtcaggagatcgagaccatcctggctaacacggtgaaaccccgtctctactaaaaatacaaaaaattagccgggcgtggtagcgggcgcctgtagtcccagctactcgggaggctgaggcaggagaatggcgtgaacccgggaggcggagcttgcagtgagccgagatcgcgccactgcactccagcctgggcgaccgagcgagactccgtctcaaaaaaaaaaaaaaaaaaaaaaaaaaaaaattaaaaatagaatcctcatatgatccagcaattctacttctaggtttatatccaaaagaattgagagcaggttcttgatgagatatttgtatacccatgttcatagcagcattattcacagtagttataacatggcagcaacccatgtgtccatcagtggatgaatggagaagcaaaatatggtatataaaaacaagggcgtattattcagccttaaaaaggaaggaaatactgatatatgctacaccatgaatggatcatgaggacataatgccaagtgaagtaagctggacacaaaaagacaaatactatatgattccacttacatgatattcttagagtagtcaaacctatcgacagaaagtagattggtggctgccaggggctaggaggaggggaaaatgggggagttattaagtagtgggtatagaatttcagttttacaaggtaaaaatggagatggatggtggtgatggctatacaatgctatggaygtattcaataccactgaactgtacacttagaaatggttaagatggtaaatatgtatattttaccacaataaaaaagtaaaaaaataagtcataggaataaatttttaaaagctattttctacatttttcaattttttctgttttatttcttcatttatactcagtttattaaacactgtttcattgttatttttgtatattggaatgatataattcttactacagttacttgagtaagagaagaaatttttaatgtaactatatcttttctcagcataagaatctctactatcttacgcctgtaatcccagcacattgggaggccaaggtgggcggatcatgaggtcaggagatcgagaccatcctggccaacatggtgaaaccccgtctctactataaatacaaaaattagctgggcgtggtggtgcccgcctgtagtcccagtgactcaggaggctgaggcaggagaaccgcttgaacctgggaggcagaggttgcagtgagccgagattgcaccactgcactccagcctggtgacagagcaagactgtctcagaaaaaaaaaaaaaagactatctactatcccctgtctcttgccctytttagttttcccttctggcactggcattgaaacaaattcatgcagatctgtatgccttaagcagtgaaagtaatttgttcttttgccctgaacacgtcatgctaatcagaacttagtttcctcaataagtatggactaattataccagtgtgcactagagaaaatgcagaatacagcaagcggagccaacatttactctgattaaccaacactccttttgctctgtgtatcaagcaattgtgtgttctttttttttcctgccttttttccctttcactgcagtactttctgctaggttgtgctatgtctcagttgaattactactggaatttgtgtaattgtgtgtgttagataaacatctctctttttctrtatttgataggcaaaatgatgtctttatagtcttgtgggcaatattttacaaatggccttctggctgtgtatcactgctgctccatgccaaaactcctttggcttccttttcttaaactctctgtcctcatggtattattcagtttctttatacattgatcaacaagaagtttggtacctatgcatttctctttkcattattattataacatgtaactttttttctttgagttagagtctcattttgtcacccaggctgtagtgcagtggcacagtcatgttcattgcagcctagaactcctgggctcaagtgatccttccacctcagccatcctaatagctagaactataggcacacaacaccatgccaggctgattttttacaaaaatttttatagagatagagtcttgtgatagtacattagtccattttcacacggctaattaagacacacctgagactgggtgatataaaggaaaagaagtttaatggactcacacctccatgtagctaggaggcctcacaatcatggtggaaggtgaaaagcacatcttacatggtggcagacaagagagaaaatgagaaccaagcgaaaggggtttcctcttataaaaccatcagatcttgtgagacttattcactaccatgagaacagtatgggggaaaccgcccccatgatccaattatctctcgccgggtccctcccacaacacatgggaattatggaagctacaattcaagatgcgatttgggtagggacacagccaaaccatatcagatattgcccaagctagtcttgaactcttggcctcaagtgttcctcctaccttgggattacaggcatgagattacaggtgtgagccaccatgcctggccttgtaatttaacttcagtaacatgttggaataagacaaaaagattgttttggcctggtgtggtggctcatgcttgtaatcccagcacgctgggaggtcgaggtaggtggatgacttgaggtcaggagtgctagaccagcctggccaacatggtaaaaacctgtctctactaaaaatacaaaaactagttgggtttggtggcaggtgcctgtaatcccagctactcggaggctgaggcaggagaattgcttgaatcctggaggtggagcttgctatgagctgagattgcactgctgcactcaagcctgggcaacagggcgagactatgtctcaaaaaaaaaaaaaaaaaaaagattgtttttagaaaataatttgtgtataattcatgataattttatgctatccttgatacatgaagatgcttcacactgtggtaaggaccagcttttagagctctgtcatttgttcccattataggaatgccatctgtaccaagtggtagctattctgtttatactgaatatggcaaaaccatcatcatcacccctcacatatacacacatattcaacactttctgtacttggtatttttcaatttatgctgtttcggagtgtatttgcaacaattttgcaactaacaatttcatggtatagtgtaatttatagcacagtttcatatctgttagttcattttgtgcaacaactttaagagctaggtattattaatattccatttttacagctgagacatgtgatagtattttatgctcatgcttaattatacagccattccatctctttgtatgttttttaaaaatatgagctcatggccgggcacggtggctcacgcctgtaacctcagcactttgggagaccgaggtgggcagatcacctgaggtcaggagttcgagaccagcctggccaacatggcgaaaccacatctctactaaagtacaaaaatcagccaggtgtggtggcgggcgcctgtratcccagctactcaggaggctaaggcagagaattgcttgaacccgggaggtggaggttgcagtgagccaagatcatgcaactgcactccagccttggtgacaagagcaagacgacgtctcaaaaaaaaaaaaaaaaaaaaaaagaccgggtgcaatggctgacgcctgtaatcccagcactttgggaggctgaggcgggcggatcacaaggtcaggagatcgagaccatcctggccaacatggtgaaaccccgtctctactaaaaatacaaaaatattagccgggcgtggtggtgggcgcctgtagtcccagctactcgggaggctgaggcagaagaatggcatgaaccccagaggcggagcttgcagtgagccaagatcacgccactggactccagcctgggcgacagagcaagactccgtctcaaaaaaaaaaaaatctgagctcataacaaaatgatccctttcttagcatgtgatttccataaatgctctcctttctttgtcagaataaatttttttgttttttaatttttcttttcttgagatggagtctcactctgtctcccaggctggagtgcagtggcatgatcttggctcactgcaacctctgcctctcgggttaaagtgattctcctgcctcagcctcccgagtagctagggttacaggtgcatgccaccaggcctggctaattttttgtatttttagtagagacaggagtttcaccatgttgaccaggttggtcttgaactcctgaccacaagttttccaaccgccttggcctctcaaagtgctgggattataggcrtgaggcaccgcgcctggtcaaattttttgttatatttttattttctttcctatgtacttcctttcttttctctgcctgtttaccttttcagtctgatcacagagttgttccttatgtttttgaaacatcactaactgcagaataataacgatggtgatattatatattatgtagtgttttcaaactgattttacagctgaaatcttatttttatcttcacaacaggtatctgaggtaagcaagccaagtgtaaatttatttttaatttttttataaaaaatttttagagaataattgagatggggttttgccatgttattcaggctggtcttgaactcctggcttcaagcagtctgtctgccttggactcccaaagtgctgggattagaggcataagccaccatgcccagcctctttgttttttgttgtatttttttgttgttgttgttgtttttcagacaggatctcactctgtcagtcaggttggagtgtggtggctcagtcagctcactgtaacctcaaactcctgggctcaggggatcctcctgcctcagcttcccgagtagctggaactacaggtgcatgccatcatgcctggctaattttttaatttttgtagagatggggtcttgctttgttgcccaggttgatcttgaacatctagcctcaagcgatcctcctgccttggcctcccaaagtgctaggattacaggtgtgagccaccatgcctggcttgtaaatttcttgttttgctggattaaaaacttgcaatcacagtgttaactaaagttatttttggttaaaatcacataactaagtgttagcaacagaaatactcgggcttttgtgctataccaaggccctttccactgccattatgactccactttatgcatactggtataatgtaatgcagacttaacattattttctctcaagatttctttcagactttcatattaccaactacttactcagaattcagtccagagaggcagtttttcttgttgctttgtcacaaacttcctataaaaagtaattatcaacaaggcaggtcaataatttgccaaattttctttactcagcaaaacacatctttgagcagttgtccctgctcgttgttgttttgcttgtttgcccattttgtaatctgtgtaaggactctatcgatgtattatgtatctatgtattagtttcccaggcctgctgtaacaaatgaaagggcgttgaacttcattagttgtcagagaaatgcaaattaagacaaaaatgagaaatgacaagctgggtggcttaaaacaacagaaatttatgctttcatagttcaggaggccagaatccaaaattaagtggttgcagaattggttccttcttagcgactcagaagggaaatctgttccaggtctctctcccggcttctgatggttgccagcaatccttggcgttccttggcttgaagctgtgtgattttgatctctgcctccgtcttcacgtggctgccttccttcctgtctgtcttcacatggcattctcccttccctgtgtgtctgtctctgtgtctcctctgctctttaaggacagcagtcacattgtgttcagggcccactctactccagcatgacgtcatcttaacttaggccttaattacatctgcaaaacccctatttccaaagaaggtcccgtcccgttcacaggtaccagaagttaggacttcaacatatcttttaagggggacacaattcaacccattaaaatatatgttctttttcctttgtctctacttctattcttgtgatatgtttacccatgtgcttcccacaagtgtctgttgaattgatcttgtttatggatttccagtctgcccacataatttatatatacagtcgtgttgcttaacaacagggatatgttctgagaaatgtgtcatgaggcaattttattgtgcaaatatcatagagtgtacttacacaaactagatggtataggcttcctacatacctaggcttcacggtatagcctgttgctcctgggctgcaawcctgtacagcatggtactgtactgaatactgttagcaattatacaatgttaagtacttgtatatccaaacatatctaaacatagaaatggtgcagtaaaaacacaatgtaagagattaaaaaatggttccaagcacaactgcatctttaaaaaaaataaataggccaggcgcagtggctcacgcctgtaatcccagcactttgggaggccgaggcaggcggatcacgaggtcaggagatcgagaccatcctggctaacagtgaaaccccgtatctacyaaaaatacaaaaaattagccgggcgcggtggcaggcacctgtagtcccagctactcatgaggctgaggcaggagaatggtgtgaacccgggagtcagagtttgcagtgagctgagatcatgccactgcactccagcctgggagatagagcgagactccgtctcaaaaaaaaataaataaataaataaaataaaataaaataaaaaatggtatacctatcagggcacttaccatgaatggagcctgcaggactggaagttgctttgggtgagtcagtgagcaagtggtgagtgaatgtgaaggcctaggacatgaccatacacttctgtagattttagaaacactgtacactgaggctacactaaattgatttaaaaattttttctttgttcttgggaatatagaaatatacttaacctttatatgtgttgaccttttatccagaaactttgctaaacccactggttaattctgataattacatatagattcttttgaaatttctatggaaatgttcatgttatgtacaaataataacagcttatatctttgttttctttttttctttattcaatacagtatcagaggttctggtgatagcagtcattcacaatctcaaggggaaagatatcaacatttcactgaaaagtatgatttttgctatagttttaaaatacatatcctttataaaattaatgaagctccctttctgttcctagtttgctgagttggtttctttttcttaattgtgagccaatgttaaattttaccaaatgtgagttgtgcatctgttgagcaattgtagtatgatttttgtccttcattctacttgtgtgataaattacagtgattgattttcaaatatcaaaccaactttacattcctaaaataagtccaattttgtcatgtcctttttatatattgccgaattggacttgctaacatttggcttagtatatttgtatctatactcattagtgagaatggcctgtaattttgctttcttataatatccctgttagggtttggtatcaaaattatgttggcatcataaaatgagctgaggaatgttccttcttctctattctgtaagagtttatgtaagattgcctctttttcttttgtcttctttagatgttttttataaatttgacagtgaaaccacctgggtgtggagttttcattgtgggtaggctttcaattaggctgtcaatgttttagtagatctagaactcttcaaaatttctttgtgtatcaggtttagcaaaaagtgtttttctcagtgtttgtctattttacttaaatgttcacgttgatggcattaagttatttataatattccttttgtgatctttttgttttcagcagtgatactcctttttttcattcttgatattagttattctctgttgttgttttttttcccccgtgggtcattcttgccagggttttattagtctttttaaagaactaactttattttgttgactttgttgtgtttcttatttaattaatttcatctatgtaaatttattgccctctattttctttgggtttaattggctgctcttattggctgttcatttcctaacctctttttaaatgtatgtgtttaaaggccagccatttctctctaagcatagaattatctgtatctataagctttaattttcattgtgaatcagttcagaatgttttctacttttcattatgatgttttttgacccgtgaattatttacatggatatttcttaatttccaaacatgggatttttttgtttgtttgttttttgagatggagttccactctgtcgcccaggctagaatgcagtggcacgatcttggctcactgcaacctccgcctcctgggttcaagtgattttcctgcctcagcctcccaagtagctggggttacaggcacccaccaccatgcccagctaatttttgtatttttagtagagacgggatttcactatgttggccagtctggtcttgaactcctgaccccaggtgatctgcccacctcagcctcccaaagtgctgagattacaggtatgagccactgcacccacctgagaatttttttagtaatattttggctattgatttctcacttacttgcagtgtggtcagaaggtatactgtaattttaattatttgtgacatctagggacttggtttatatctagcatagaattagtatttatttacttatttatttgagatggagtatgagaattagtattaattaattaatttatttatttgaaccacggcacccgtctagaattggtctttatgattgctccatgggtatgtgaataaaaaagacatattctgcagtttgtagatgtgtggttctctatatttcagttaggtcaactttattaatggggattttaaaaatcctactatcgttagtcttttttttatgattcttttgttagttactgagggatatgttctaaaatttccccttatgattgtggatttgtctgtttcttcatttagttttatccgtttttatttatatattttgaggctatgttattaggtgcatatgatttttagaaatatattgaattggctgggcgcggtggctcacgcctgtaatcccagcactttgggaggccaaggcagggggatcacctgagtctggagttcaagatcagcctggccaatatggtgaaaccccgtctctactaaaaatacaagacttagctgggcatggtggtgcatgtctgtaatcccagctacttgggaggctgaggcaggaaaatcacttgaacctgggagatggaggttgcagtaagccgagatcccgccattgcacttcagcctgggtgataagagtgaaactctgtctcaaaaaaaaaaaaaaaagataaaagggatatattgacctgaacactttgtcactagggaatattcttctcatctatgttgattttttttttgagggggacttaaagtcagtgtcgcctgataatagcgtagctacacttcttcccttytggttgatgtttcaagatatgtattttccatactttgacttacaaccttttcaatcttttactcatgtatcagttttttttcttaaatccaatctgatggacttcatcattaaattttattacttagttcattaaaatatattgtagctactgacatattgtgttttaattttactgttacactctttgccttccatttgtcctgtcttttctatattcattcttttttttttttttttcctcctttgagattgattctcactctgtcacctaggctagagtgcagtggtgcgatcttggctcactgcaaccttcacttcctgagtggctgggattacaggtgtgtgccaccatgcctatctaatttttgtatttttaatagagatgctgttttgccrtgttggccaggctggtctcgaacacccaatccaagtgatccgcccacctcagcctcccaaagtgctgggattacaggcgtgagctactgcgctgggcctaatcttgcccttttytggggggggtggggggttataattaaaaccattctattatttgacttcattagtacttacacagtgttttacattttttttttttttttttttgagacggagtctcactctgacaccaggctggaatgcagtggtgcgatctggactcactgcaacctcctactccctggttcaagtgattctcttgcctcagcctcccaagtagctgggattacaggcacgcgccaccatgcccagctaatttttgtatgtttagtagagacagggtttcaccatgttggccaggctgttcttgatctcctgacctcatgatccacccatctcagcctcccaaagtgctgagattacaggcgtgagccacctcacccggcctttktttgtttgtttgtttgtttgttttgcaattttggctcrctgcaacccccgcctcccagattcaagcgattctcctgcctcagcctcctgagtagctgggattacaggcgtgtgccaccacacccagctaatttttgtatttttagtagagatggggtttcattcaccatgttggtcaggctggtctcgaactcctttgaccttgtgatccacccaccttggcctcccaaagtgctgagattacaggcatgagccactgcgcccagcctgcttttcttttttttttttttttaattttaatatagagactaggctgggcacagtggcccatgcctgtaaatctagcactttgggaggctgaggcaggaggattacttgagtccatgagtttgagaccaacctgggcaacatggggagaccatgtctctacaaaaaaatacaaaaaattagccgagcatggtggtgtgcctggagacccagctactcaagaggttgagataggaggatggcttgagcctgggaagcrgaggttgcagtgagccatgatcacgccactgcacaccagcctgggcaacatagcgagaccctgtctccaaaaaaaaaaaatctagagattaaggcatgctttcctgacttaaaatttagtataaattattatttttgtcactttcagaataatgcaaggacctcagcaaactttaactccatttattcccctttcaattaatagactaacattttttccattcttctgtaaaacacatacatatcttcattttataatgtcaatatttgcttatatttacccatgcatctcctttacccttgctctatatttttttcctatatctctaagtttctttttttgattattttccttttgcttaaaggacactcttccttttgttctgctggtgrtgaattccatatatatttttttcttttcttttcttttcttcgtttcatttctttcattttgagctgggtcttgctctgttgcctccagtggtgtgcagtgacactgttatagctcactgctacctcaaacccctgtgctcaagcagtcctcccacatcagtctcctgagtagctgggaccacaggtatgtgccaccatgcctggctagcttttgtatttttttgtagagtcagcgtttcactgtgttgcccaggctgatctctaacttctggactcaagtgatctgcccttctcagcctccaaagtgttgggattacaggcgtgagccactgggcccagccttgaacaatatttttttaagtttaggttttatattactttgtccaaaactattaccataatccatttcaattcataagactgaaataaatacttgaggtatttgaagttctattgaaggtttagttgaagagcaagaataaatgtaacatgggtttagcccttaaggacttttttttttttgagacggagtctcgctgtatcgcccaggctggagtgcagtcgcgcgatctctgctcattacaagctccgcctcctgggttcatgccattttcctgcctcagcctccagagtggctgggactacaggtgcccgccaccacgcccagctaattttttgtatttttagtagagacagggtttcatcgtgttagccacgatggtctcgatctcctgacctcatgatctgcctgccttggcctcccaaagtgctgggattacaggcgtgagccaccgtgcctggccaaggactttataatctggtatgacatgaggcacaggtttctgtaatattagagtagaatgtgataagtagcagctacaaggaaggatggtatatttatgaaatacttgaataggaacactgagaaagtcatgaaactcaaactatttgtcttttgcaacctagctgtattagtccattttcatgctactcataaagacatacctgagactgggaagaaaaagaggtttaattggacttataggtccacatggctgggaaggcctcagaatcatgataggaggcgaaaggtgcttcttacatggcagtggcaagagaaaatgaggaggaagcaaaagcggacacccctgataaaaccatcagatcttgtgagacttactcactatcatgagaataacatgggaaagatggccccatgattcaattacctccccgtggttccctcccacaacacatgggaattctgggatttacaattcaagttgagatttgggtgggccaaaccatatcactagcatactgaaagatttaaaaatatatatgatgatctttttggttatatattcagaatacctggctgtttgcaagacagttggaactactttgaagaaatatgccactctgaagatgtctgctgagaattatctccacaaacaatgctgttgctaggattacatattaatgccatctttatgtggccatatgtctttatcagtttcctttcactatctgccatggcttttttttttttttttcatactaagccttctaaatctggcatattttacacttatacctcacatttatagcacatctcaattcagagtagccatgtttcaagtgccaaatagtgacaaaaggctaatgactacacttttggacagtgtgtgtctagatggtgagatagacttttcaaaaaacaaataattgttatatttgttcaactctttgtgaagtaactgaagaagcccctactgacttgatcagaagtaggtgccagggaaagatttagattttcaaggaaagttttacagaaaagttgtcgtttgaatgctgtcttcaactatgaatataaatttggtaggtgtacaaaataggccaggggaatagcgtgtaaatcatgatgctgtataagagtaggatttgttcagaggctttcaagtatttccttgtggtcggagaataggtacgtgtgtgctagtggaaggtgagactggaaagatagattttgaagaatgtcagatgctagtgattcttcaccagttcttgtgttatgagtaatttaccagtaatgacagttaacctcaggataaattttctgcagtgtaattgatagatctcatagaatgaccatttaatgtcccctcatacattcagggaaacttatgggtttgaactaatttacactgcctctagcaactatgctggtttcagtgcatgttcaactgctataattagtgtagttttaatgtgctcattttgctgcattaggtttgtattttgttactgtattttactrtgtttgtattttgttcaccaattcatcattggtggttgaacatttttcttattaacattgaaatttactcctgtctagtccttagaccccattcaggccttaccagttgtctcaataacatcctttacagcagaaggatccaggggagaatcaggcattatacctcagttttcccttgtctttgaaggaaagtacttgacatttttgaagattacaggttggtyattttgtagaatgtcccccaacttggttttgtctgtttcctcatgattagactcaggctacagaactttgacaggaacagtacttctcatcgcatgggactttgatttgtctgattactaatgatgttcactttgatcatttgatcaaggcagtgtctgctggattttactgctgtgaaattactttttcccttggaagtaatgtgtagtttatgggggaagtattctgaaactatcccattcactaccacactttccatttattcactcatttatttatatctatattgattcatgatttcttattttgttcagtaggttataatccattgctattactattggtattgatgctgaaattaccctgtttggccagtgggatctccttcaagcttgatcctatgtctttttgacattctttagcattccttgagcactttcttgcttactaccacaagatattccagattgatcctgtactttttctacccstgtgctgtaattagtgaattacaattctccagagatgtctggttccttttattggagaatggtattaggggccaagtgttaggtgctagaaacgttcataccactggggagggaagatgatcactgctccaaggcgctctcagtagatagaattacagagctagggagtatgcatctgtgtgtgcttatgtagacacacacaccatgcatgtatgtccatgtcttcagaaatccatgagttcactcatacttacagtttattttttttgaaacgcagtctcgttctgtcgcccaggctgaagtacagtggcatgatctcagctcacctcaacctccgcctcccgggttcacgtgattctcctgcctcagccttcctagtagctggggactgcaggcacaccccaccatgctgggctaatttttgtattttttggtggagatgggtttcaccatgttgcccaggctggtctcaaactcctgacctcaaatgatccacccaccttggcctcccagagtgctgggattacaggcatgagccactgtacctggcccagtttcaatccacagagttcattctaacttyttccatttccatatttgcatctcccttctctgccaagtgagaactctgggtcccattgcctttaataaatcttttttaaaaaagaatttttttttttttaaagaaatggggtctcattctgtcactcaggctgaagtgcagtggagggatcatagctctctgcacccttgaactgctggcctcagtcgactctcctgcctcagcctcctgagtatctgaggtagctgagtaggcacctgccaccacatctggctaatttttacattttttgtagagacaagatctcactgtattgcccaggcaggtctcaaactcctagcctcaagtgatcctcctgcttctgcctcccaaagtgctgggattacaggcrtgagccactgcatctgcccttaatagatcttatttgatccttccctctttatatagcaaatctcccattgctgctttgaacccttctatgtggaggtgctcaggctcctactttccctgccagtcctccaccctcatgggtgccctcctcctcctccacactcggccttcaacatcctgtgcaagctggctctgcctgcgaatggcctcctcacgtagcttatattccracaaccatgcaggtaccctgtgatgtggatacccacttggtggctataagagtgaatttttcaggaagggaagagaattctgatttcctaagttttactttaatggttctagctgtgggattattttgacattctttgagtcctttcaattttaggtgttacattttctctaattctgggaaatttagtcattatttctgcaaatatttcttcactctcatttgtgtttttctctcctcctgtgtaagctattgtgtggcagttgatttccctcatttctctatcttatctcttgctttttcttttatatatttaatctctttctactgtcttttggcagagtaccccaaatctgatattttagcttatttatttgttcaactgtatcctttctgttcttcagtccatctattaaaattcattatttcaccaattgtatcacattatttcagtgactatattttgtctgcctatttttacatcctacaccaggaccaaattttcctgttgttccaggaatttctgtctgtgtgtaaacacaaatcagtttttaaaatttaggtttgtattgtacatactgtctgacaacttactgttgttttctgtttttacatggcagstttatgaaatttattacaagtggagatagtttcaatatagttttaatatacgtctgtgtgtgtacgtgtgtgtgtatgtatatgtgtgtgtgtgattttatatcccttttatactgaagtgtactcataccattgcctcaccttcttaaacagagttgtaagttagtgattgggtagagtgcagtggtcagtattcctaaccattttagtctttggggcctttaggttgttttcaatttttaaatgttatgatactaaaataaatacacggataaagtgttttcccatttgtgggatcattttccagaaggatttatagagtggatcaaatggacaaataaatcaatatttttagattgttaaccatgtagaggaatgcctagaacataacaggcattcaaataatatttattagaggaaaggatattataaaaattgctttctaatatggttccaattttcatccataccaatgataggagatgatctattttctttctttttttctttgttttttgagatggtgtctcgctctgtcacccaggctggagtgcaatggcacgtctcggctcactgcaacctccgcctccctgggtcaagcaattctgcttcctcagcctcctgagtagctgggactacaggtgcccaccaccacgcccggctaatttttgtatttttagtagagacaagctttctccatgttggccaggctggtsttgaactcctgacctcaggtgatccgtccacctcggcctcccaaagtgctgggattacaggtgtaagccactgcgcccgactgagatgatctgttttcttacagtatcttacacttaaattatatttttgtgatttgattgtaatcagaagaattctatatctgtcttggataaaaaatactatcagatgatataactaaggtttttttctatttttatttttacctcctgcatgaatgaacatatrttttcttacaggactgaatttrctcttaaagaaatcatgtcctctggaggtgctgaagatgatatcccacagggagagaggaaaacagttacagatttttgttatcttctggataaatctaagcaactgttcaatgggttaaggtgagtggactcttggtgttttgaacttttctttagttctgcatttgttttttttctggctgatgtgtggtaagtttccgaaaattatgggtagaatgtcatataaatttctgtattagagtgatcatgattttttctttgacatcatttttaaaattcttggataaaaaaacaataggaaaagaggataacttacactgttttagtcaacttaaaaagagctattttgtgaaatggttttgtatacataactcacaccagatctgattttaatctggttttgcacattagggtgttgaggtctgaggagcctaaaaatgcatatgcaattgaatgtggagcctcctattgcatttttgtaatttgtttacttgcttgtttcttttattctttctttctttgttttctgggatgaaatgtctgtgcctaaagtaatgatggttacctttgtctaccagattggggtggtgatggtggggggtgggtggaaaaagtaatgatgaggtgttataaaccatgctatttatgatttaacctgtatttcagttcttgagagtcttaggatattcactgacttcagacctaaagcttcattagcttagtaccagttagaagaaaattcatacaataggtaaaattctagggataaacaggttttatttttgaaaatttacataggaaggagtgattgtaaagatactaagttattttaaattatggtttatttatggataaaaatgaaatctttttatcttacattttacaattgtattatacatccccaggtttggacgtatactggcagggtttatttttaaaccagataatttatcttttaaaaaaattatgtgaatttttcaaataccattctgtctaaagctgcccttttaatcattctctttttcctatattcatttgatttgcttcatgacactcaccactcttaatattatttacttgcttattatgtctctcccgcattaaaatgaaatgtccctaagagcaggcccctgtttgtcactgtttctctagtttttaagcccatgtcttgcacattgtaaaggctttgtgaatatttgttaaatggaagattccaaaggcagtattcttaactcttgcactcttctgcttcctattttatgctgcagaggagatgtttgagatcatgtttttctttggctttataaattaattgtgtctttttaaagaatattttctttcactattttaattcagaagttttccttggtatgcctggggtttaaatcttttattttcctgcaatagattattttaaacctcttaaatttgcatacttagactttttttttttctctttgccttccaggtatattttttttcttcaacatttaattggcacccagtatgtaccatattctgtattgggtacgaaaattcagagataaagctaacagtccctgccctcaattactctatgaggaaattataaaaaaacaaaacccaaggcaaacttctgctcacagcaagcctcagctttagcacatccagtgaacctatttcacagataggaacacatatctgtgtgcctattgaaattaagtaagtaaaaagttagaagaggccaggcgcagtggctcacgcccataatcccagcacttcgggaggctgaggtgggaggatcacttgagcccaggagtttgagatcagcctgggcaacatggtgaaacctcgtctctacaaaacatgaaaaaattagctggatatggtggtgagtgcctcaagtcacagctgctcgggagactgaggtgagaggattgctcaagcccaggagatcgaggcttcagtgaactgtgatcacaccactgcactccagcctgggtgacagagcaagacccttaaccaaaaaataaaaacaaaatcttaaagggattatagatttaaaggtaggaaggcatttaaaagcttgcatttaaatcccttgtgtaacttctggcacatgggctctcaaacttaaaacactgacatrgttataatagctcggaccccatttttttgagacagttttatggagctatatttatatacaataaaatttgcccattcaaagtttacagttgaaaagtttggtatgtttgcagagttgtgcagctgttagtacggtttaattttagatcattttaatcacccccaaaagaaatccggttcctattagcagtgattctacattcttccaaatcctaacccctgacaaccaccaatctaatttttttctctatggatttacctattttggatattttatatattaattaattggaatcatacaatatgtggtcttctatcatggacatcttttgttaacataatgtttttgaggttcatctgtgttatagcacatatcactacttttattagtgattaatattccattgtaaggatttatcacaatttgtccagtcatcagttgatagacatttgagttttttggctatcaagaataatagtcctgtgaacatttgtatacaagtttttatgtgagcgtaggttttccttttttttgagacagagtgttgctcttgtcrtccgggctggagtgcaatgacacgattttggcttactgcaacctccgcctcctgggttcaagcaattttcctgcctcagcctcccgartagctgaaattacaggtgcctaacaccacgcccaagtaatttttgtatttttggtagagacaggtttcactatgttggccaggctggtcttgaactcctgacctcaggtgatccacctgcttcggcctcccaaagtgctgggattacgattctcttggccatataccaaggagtagaattcctgggtcatatagtaattctgtgtttaaccttttgaggacctgccaaactgttttccaaagtggcctcatcaccagtaatgtgttctagtttctcctcattctcatcaacacttactattttctgtctttttgattatagacatgctactggatgtaaatggtgtctcttggtggttttgatttgaatttccctaatgttgggcatctttttatgtgcttgttagcgatttctgtttcttctttgggaaagtatctgttctaattctttgaccagttaaaaaattgaattatttttaaaattattaatttataattgtttatatattctggatacaagtcccttgtaagatgtatgatttgcaaatatatattctcttattctgtggattgtcttttactttctttctttcttttttttgagatgaagttttgctcttgtcccccaggctggagtgtgatggtgcgatcttgctcactgcaacctccgcctcctgggttcaagtgattctcctgcytccaagcgattctcctgcctccaagcgattctcctgcctcggcacccaccgcccccctaccccgagtagctgggattacaggtgcctgtcaccatgcccggctaatttttgtatttttagtagaaacgggatttcaccatgttggccaggctggtctagaactcctgacctcaggtgatccacccgcctcgacctcccaaagtgctgggattacaggcgtgagccaccgcaaaccggcatgtcttttactttcttaatgatatcctttgaagcacaaatgtttttaattttaataaagttaaacttatcattcttttctttcattgcttgtacttttggtattgtatctaagaaatcattgcctaacttaaggtcattaaaatgtactcccgtgtttttttctaagagttttatacttttagctcttacatttaggtctgtgatccattttgagttctttttattttaattaatttttttgagatggagccttgctttgtcacccaggctggagtgcagtggcatgatctcggctcagtgcagcctctgcctcccgggttcaagcagttctcctgcctcagcctccctagtagttggtgccaccacactgtatttgttttagtagaaacgggatttcaccatgttggccaggctggtcttgaactcctaacctcaagtgatccgcctgccttggcctcccaaagttctgggattacaggcatgagccaccattcccagcccattttgagttaatttttgtgtatggagtggaatgttagttttatgttattttttaaatcagaaaaacatttccaattgttttgattattgcatatttttcattttttctttttaaacattgatacataataattttacatatgtatggggtacatgtgatattttgatacatacataccattgtaatgatcacattatggatttgggatatccatcacttcaaacatttatcatttatttgtgttgggaacattttaaatctgctctttgagctattttgaaatataaatcttatatcccaggtatagagtcgtatctttctaaggtgctgttttaaaattttacaatactaataatgataaattttgatctgtcacctggaagagtggataagcaaatataccacagatatattttcagtgttttattgagtgaccctcttcaatttaaataagatataattggctgggcatggtagctcacgcctgtaatcccagcactttgggaggctgaggcaggcagatcacctgaggtcaggagttcgagaccagcctggccaacatggtgraaccccatctctactaaaaatacaaaaattagccaggcgtggtggcacacacctgtaatctcagctactcgggaggctgagacaggagaatcgcttgaagctgggaggcggatgttgcagtgagctgcgatcacaccactgcactccagcctgggtgacagagcaagactctgtctctaagtaaataaataaataaataagccataattatttatacaaaaataggtctgtggtgagcaaactatatatcttctctgaatgcttttggatttttgtttgagagagatgtggttgtccagtatagcagccgtattgttttcttttttttgtttatataaatgaaagtatctccaggagcagtggctgatacctgtaatcccagcactttgggaggcgaaggcaggagaatcacttgaagccaagagctctagaccagcctggcgacataggaagactccatctaccaaaaatttaaaaattagctgggtgtggtggtgtgtgcctttagtcccagcaacttgggaggctgaggtgggagggtcacttgaacccgggggtttgaagctgcaatgagctatgttatgccactgtactccagcctgggcaatgcagtgagaccttgtcccttttataaaaagaaaagagaaaaaagtgttctttgttcaatattagaccttgattataaagggctgtctttatcagttttgtaggccttccttaaagttccctgtggtggtgggttggaggtgtgtattggcattcttgtctacactactctccctgtttcctgcgtaaagaagatctttgagttttgttaatcagaaacctcttttctttcgagtgttgatgttgctttatgagcatttcttgagaaagggacaagatttattttggaataattataaggtttttttggttgctatccccctgcgcccacctccacccccttatttaaattggtctgagtaggtctatggcccttatagagaagaagaaatgtattggtagtggtctggaccagcattggcatttggggaaatggaatgaagtgggatccagctggaatagtgtcagtttttaatattaagccctttccctctagcatttttttcactgttagtgcttgtctttttttttttctccttttccacatgttgtaacatgtttttctttttgcttgctttcttcaattcatgtactgtgtcttaaacttattactgaagtataattgactgcggaaaagtgcacatgctgtaagtgtgtttttaagaaactgaatacatccatgtgacttgtattcagatgaagaagtagcacacacagcacctcagaaacctcccctgttgtgttccctgttacttggactttttaactcattatgagcagagtgaaaaagggcatttcagtgcatgaaaggtttcagatttttgtatcatgtctcatttgggatataatagattctctttttacgcttggaggtgtgtctttccacattatattaagctgttcatctaagttgtcagagcctttcattttcccagctgtgaatatcttaatggagtatttttctcaactgaaaataccttcttataatatgtgcataatagtttatctcttatttccactcactgtgtaagaaaacataatccagaaaaataagaattggatgaaatgaatgatgtttcgcatataatggctcttgcatgtagttgcaataataatgaagtgagaataatgttagaaaaagctttgaatactgtcagaaaatgrtcaaaagcccaagtgcttgcagggttctggttgccatggtgactaagactgtcgaagcagaatggaatacttagtgagattatataaggcagcatctcgagacatgtatttgagaaacacagctgtgtctatcagtgatatccctaacttgcagtgttttgcaaaagcagaggcctccaagtcactaattatttgactacagaggagcaaatacacaaagccaaagaaggcttgggaggccactgatagtatatataatattattattatagtacatataatagtatatattgtgtgagtgtgtgtgtatatgtatatttttaattgggaggtgccccaaagtgaagtgtactagtcttaaatgaaaataattacagaaattatttttattaaatatgctcctagccaggtgcggtggctcacgcctgtaatcccagcactttgggaggctgaggcaggcagatcacctgaggtcaggagtttgagaccagtctgaccaacatggagaaaccccatctctactaaaaatacaaaattagccgggcgtggtgtcacatgcctgtaatcccagctacttgggaggctgaggaaggagaatcgcttgaacctgggaggcggatgttgtggtgagccgagatcacgccattgcctccagcctgggcaacaagagcgaaactccatctccaaaaataaaataaaaataaaattaaataaataaataaataaatatgctcccagtattcaacttaagaaagtttctataatgcttcctttagaagcctgtttttaggattccctttttcctaaaatggacaactgagaaattaacagtttgttccattgaccccttcttcccctcccctgcccttttcttcttcttcttctcttttcttctttcctccctcttctccttctccttcttcagaaaattaatattctcttagaggctagttctgcaaactggtaatggcaagtttattgttattgaaataaataaccatgttattttagagattataccctaaactgtctgtacaagcttgtgatataggctgtcattttatatggcttaccaccagaagaattggacttgcctttgaggtagactgccaccagagtacagtaggtatcttgatcacatgctcttgaacatcattgattgactaggctgggcatagtggctcttgcctgtaatcccagcactttgggaggctgaggtgtgtggatcacttgaggttaggaatttgagcccagcctgaccaacatggtgaaaccccatctctactaaaaatacaaaattagytgggcatggtggcacatgcctgtagtcccagctacttgagagtctgaggcaggagaattgcttgaacctgagcagcagaggttgcagtgagccgagatcacgccattgcattccagcctgggcaacaagagtgaaattccatctcaaaaaaaaacaaaagaaaagaaaatcaatgactaatagaaatttaatataagccacaaatgttattttaaattttctagccacattaaaaaataaaaagaaacaagtgaaattaattttaataatatttgatccaataaataaaaaatattctacttcatcataaatcgatagagaaatattagtgatattttacattgttttttatactaagtctttgaaacacagtgagtattttatacttacatacatttcagttcagattaactacattcaagtgcttagtagccatgtgtggctgtttgctcaggcaaaattcctcccagttttagtttctgttctcataatggctgactgtgctttctcgtgaatccatattggctattttggggttgtcttcttcactggtccatgaggtgttcccagttttgctttctttgtctcctccaacatagatgctaatagcttgcaggtcttttggctgttggtaatttgtctccaaccacctgggatttgatggttaccatattactgtatcagtttgctatggctrccataacaaggtgccatagactgagtagcttaaacaacagaaatgcattttctcacagytctggaggccggaagtccaagatcaaggtgtcagcaggttcagtttgttctgagccctctctccttggattgcagatggatgcctccttcctgtgccctcacatggtcatctttgcatgcatttgtgccctggcgcctctttgtatgtcctaatgtcttcttctaaggacgcaactcatattgtattaaaaccttccctaaaggcttctttttaattacctctttaaaggccctatctccagatacagtgaaattctgagatactgggagttagaggttgaatgtacgagttttgggaataacaattcagcccataacccttggttttattgaaatgttaccagtgggttttgctttattatctgtttgttctgcctgtgttgggaaggtatctgaatagattcaatactatgctgtcaccatttccccagaatctagaaaattagctatttaaatgctatgctaaaatattaaacaataaaatagatgaatatattctattataatataatatattctatcaaagtccatataaccaggtcttatatgttagctccctctaagatcttgtcaggtcttactagaaacatagagcatcttcccctttaaagttgctggtagaagctggatcgggaattggttaggggagaggtagttgtagttagtttttttttttttttwaatttcagtagttttttggggaacaggtgtgtttggttacatgaataagttctttagtagtgatttatgagattttgatgcacccatcacccaagcaatatacactgtacccaatgtgtagtcttgttcctcacgcccctcctaccctatcgtgagagtcccaaaagtccatgtgtcattcttatgtctttgtatcctcatactttagcttccacctatgactgagaacacatgatgtttggttttccattcgtgagttacttaacttagaataatggtctccaattccttccaggttgctgcaaatgccattatttcattccttttatggcctatctcatatatatatacacacacacacatatatatatgtgtgtgtgtgtgtgtatatatatatgagataggccataaaaggaatgaaatatatatatgtgtgtgtgtatatatgtgtatatatatgtatatatatgtgtgtgtgcatatatatatatatatatatatatatatctcacaatttctttattcacttgttgattgatgggcacttgggctggttccatatttttgcaattgcaaattgtgccattataaccatgtgtgtgcaggtatcttttttatataaatgacttcttttcctctgggtagatacccagtagtgggattgctggatcaaatggtagttttacttttagtcatttaaggaatctccacactgttttccatagtggttgtactagtttacattcccaccagcagtgtaaaagtgttcacttttaaccacattcaatagtggttagtttttaagattcttcaggaggggtatagagagaaaattaaaaagatatgttaagaaccctgaagaattcattaaatcctcaaaacaatgtcattagtgtctattattttggttctacagatgagaaaaacaaagctttgccagttaaagtcatagcctatgttaatgtgatagattataatttgagaagtgctacttccgagaagtttttcctcaatttaggagtaaggattccaaacacagacgaatgtttgactctaagaatagaggcaggccaggcacagcgactcatgcctgtaattccagcactttgggaggccaaggccagaggattgcctgagctcaggaatttaagaccagcctgggcaacaaagtgagaccccgtctacaaaataaaaaatatagctgggtgtggtagtgcatgcctgtagtccagctgctcaagaggttgaggtgagaggattgcttgaagccaggagttcaagaccagcctgagcaacacagtgagacctcatctctatagaaaattttaaaaattagctggccagatgcagtggctcatgcctataatcccagcactttgggaggctgaggtaggcagatcacttgaggccaggagtttgagatcatcctggccaacatggcgaaaccccatctctactaaaaacacaaaaattagccaggcatggtggtgcatgtctaaaaatgtcacaggatccttagggtgttatttttccagccagaaacctctgtggctagtggcacctttgcccgagttttgcttgggctcactgggcttgttcccgctactcagcctggcaggttgtgcttgacttatgctactggctcagatcccacacctgccaagggtaggccaggtatggagcagcgaggggtgtgttagcgaatgggcatggggtctggccactgtgcacagccaagcaagctagctgccgtggtggggcaggcatctccaggcactggcgccatgcaaggttgcagctggattagatgtgcctcaagcagcttccactgcaggcacccacatctggacgaggggaacatggtggtggtgcccagaagcttggagatgccaggaaccacaagccccaaagaggatgtcacaaccctggctcagggagcccataggtctgaactcccaaagggcctcagctctttccttctcattgcctacaacgtggcgagcaagggggcatgtttcagccctgtttgtgttaccattttttgagtaccagaatttgccaggtcctgagttcttgtcctgcgcccaggaagaatgaggtatgtggacaactggagggtgaacaaggtggagaggagcttcattcagtgacagaagagctctcaggagacccctagtaggtagctcctttctgcaagcaggttgtccaggcaagtgtccagctcttagcagagaggagacctgtagtagttgctccttcctgcaggtggatcatcccagcaagtgtccagctctcagcagaaaggagtgggtagctcctttctgtaggcatgtcatcccacagagggtatgagtctggctgtctggggttattttgtgctctgaatggtggaagtgtgtgctgattggtccatgggaggccacggatgggcctggaaaaagcacctcgagttctcactctgggccatggacttcaaccagaactggcagccttatccccccaggcccgcctccyatgctcgtcattacccaaagtctggagagggctgaggcagcagggggcttgtgaatcagtgccgtcatgagcacacccagtcagttgtgacaggtcccaggcttggccacaactttgctccaccccagagtgggtgccaggagctgggagaggccagggagcaggagcaggtactttcaagcatgtgggggcagggagcttcttaagaccctgagaacacagggaagcatgggtccaaagctgcagctgggtagctgcagctgcacccaggagcgctgggctcccasccctccaactcagtaggtggcccggcttccacctgttcctggcctccacccattctgtggagcatgcagccctggccacaacttccccactgcagtcggcatccctgcagcagctgctccagatgggctgccaccaccatcataatcccagctacttgagaggctaaggcgtgagaatcgcttgaacctgggagggagaggttgcrgtgagtggagatcgcaccactgtactccagcttggacaacagagtgagaccctgtctcaaacaaaaatattagctgagtgtggtgccatgcacctgtagtcccagctactcaggaggctgaggcaggagaattgcttgagcccaggagtttgaggctgcagtgagctatgatcatgtcattgcacaccggcctggaggaatagagtgagaccatgtctttaaaaacaaagaacaacaaaaaaccactgggtctaccaatgggtaaaagcaaatactggtgctaaacaaggaaatgctcaactgggctttgaagtctcaaatgcagtttggtctcgtatacacatgaacacagaaacatggtttggaacaaagatgtcccagtaatatagtcctctgtgtttaaacaagaatatgtgagtcggacagtgtgctctttgactgaaaacctgattcagagaagttggcttattcctttgcctttgaccacagctttgttggaggtcagcagcatcctaagagccagggagcaggccaggcacagtggctcacgcctgtaatyccagcactttgggaagccagggcaggtggatcacttgacgtcaggagttcaagaccagcctggccaacatggcgaaacctcatctctactaaaaatacaaagcaattagccaggcatggtggcaaatgcccataatcccagctactcaggaagytgaggcatgagaatcgcttgaacctgggaggtggaggttgcagtgagccaagatcatgccactgcactccagcctgggtgaagtgagactctgtcaaaaaaaaaaaaaaaaaaaaaaaaaaaaaagccagggagcagaatgtggtcccagaaaagaactaacaactttacttgcgtacaaaatctaggtggttattccatatggtggaaaagagcattggattaggaggtagaaggtttgaatttgaatcatagctctacagcttactggccataattcctaagtaacttcctgtatgtatgtttctttttgtatatgtrtgtgtgtgtgtgtgtgtgtgtgtgtgtgtacacacacacacacacacatactctggtggaagccatgcatttagggactggactaaggaaagagaagttaatggaagagattgtaaggacagaaaaaagagttacaagatggtgagaaagtggtgaacagtgtaatgccatagagaggactgataaagaagggactgaaagatgccccttggacttggattttaggtgtacgtagggatcaatgatcttagctaattcagtttagtaaagatgggggatttacaggaaatttacagagatttcctgagttttgatatctcaacgttatatttgaaacatccctgataatcaggtttaattatttgcactgcatttcttcctaccatagtctcctgagttctactgatagaactgaggatttcaataaagagagattagtgtcatacttttactttcctccaaaatcttggaaaaaagaatatgattagctaattcataacatagctgcctttgcaaaatgtgaaatataaggtcacttaaattatggggtaattcagagccctatttaatttaattctatggaccattaatttcccatctttgctgacagtaataatgaccaaatgatatattcagagtttaaaatcagagtcaagctctgagtagtagaggagttttttttgaaactcttcatagagtaccttagttaattttagatgctgatcatatagtggttcgtatattaacttctgtgatatgtctcattagaaaaaggatgatcataggagttttcctatggacaaattttaaaaaatttaaaccctattttgaaaaagaaactggtgtctttataactgatttaractggaatagtagatgttctaaattcttttgaggaaaatagtatagaagttagccaatgttgttcatagctataaatcagaaaatatttatatattacagcttactgttaggagccctagtatagcattttagatcactttttatgtacttttagcctgcgtacgaagtcctsttcctttataaccctttttacttgacacctgaaataaaacactggcttctagttctgttttctcccttaacaggatgtattactgagatttattaattttatcagttttggaaactcaaaggaacttgcaggcaagtgcttacttgaaaaattgcctaaagactttagatagtatccttaatgaaacacaataattgtcagttgtcacaaagttggtgttgctgacaaatgcttgtacataataatacaatcttcctaacagcagcagcttcataagagaaagtttctagcagcaacttacatttaaaaacatctgattaggtcttcctgatgtaacctctcattagagatccgtggagacataaaaaagatgaaaacttacaataaatgtgggaaactaatatccacagttaacctatttctgtaatctgaaatgaatttcagcttataaggaaaatggaaatggatttttaaaatgcagttttaaacttgctaattcttgctattgtgcctgaaaatttcaggtaggaaaatattttgctttcttatccattaacttaacatctggtacaaaaatgcagatcttttttcactcttcacttccacctacagaaattgacctttcattcatattgtgtagctattcaaatttattagtatgaagatatttattacagcatttttaaaacagggaggccgggtgcggtggctcacacctgtaatcccagcactttgagaggccaagacggcggatcacttgaggtcagtagttcaagactagcctggccaatatggtgaaaccccgtctctattaaaaatgcaaaaaaaaaaaaaattaattggacatggtggtgtgcacctgtaatcccatctactcaggaggctgagkcaggagaacgcttgaacccaggaggcagaggttgyggtgagccaagatcgtgccactgcactccaacctgggtgacagagtgagactctgtctctaaataaataaataaataaacaaaacagggaaaaagtagaaagaatataaatgttcatcaggaagatattgattaaataagttggttcattatatactactttgtacacagtaaatattgatataattctctatgtattaaagaaacccgatatattcttaaatagacatgttgcaggacattatatgtagttttatcccattgatgtaaaataatggaaaaactcatgtatatacttaaatgtgcacagagaaagaaatcattcttttttgtttgtttcttgagacagagtctcactctaactcacccaggctggagtgcagtggcacgattatggcttactgcatgcagccttgacctccagggttcaagcaatcctcccacctcagccacccaagtagctgggaccacaggcacctgccaccacacttggctaatttattgtattttcttatagagacgggctctccctatgttgcccaggttggtctcgaactcctggattcaagtgatcctcccacctcagcctcccaaagtgctgggattataggtgtgagccacagtcccctgccaaaatcattcttattggtggtgtttgtggggaataaagttgaaaggagaagcaagagagcattgttttactttttgctttatatactttatagtatttttgttttctagagacttttattattttcataattgaaaaggaaagaaacataaggtctctgtgatagattgtttgtaaaatgagtcccttccctgaatccatgcttattactagttccctgtcatactgcctctgggttgggctaatagatttgctttggccagtgggacagttgcagacataattcaaatacttgaaaaatgcacattagagcttgtcttctctattgcaagtcttaaaaccttgtaaccaagccctatataaataaacccaagctggtcctggacatttgagagaggccacagaccactagctgtctgagttgcctgagtgagatctgactgagactggcagaactgtccaactgaactcacatctaattgcctacccataaaatgattagcgactacatggtttttgttttaagcttctaagttttgaagtggcttgttatgcagcaaaagttaatcgataaagtctccagtggtgaaatcagcacctgcccttctgcatttttactgctttatgagatacccagattgctatttctttctttttctttttcttttctttttttttttttttttttgagatggagtctcgctctgttgccaggctggagtgcagtggcgtgatcttggttcactgcagcctccacttcccagattcaggcgattctccggcctcagcctcccgagtggctgggactgcagacgcatgccaccacgcctagctaattcttttgtatttttagtagagatggagtttcaccatgttggccagaatggtctgctctcttgaccttgtgacctgcccaccttggcctcccaaagtgctgggattacaggcgtgagccactgcacccggccccagattgctacttctaaaaattaagcmgaatgtaagagggggaagaaatattgtcactgtcacagtatacatactgagagctatgaaaccaatgagtaaagatcagttggccgggtataaaaaactttcagaagattgtcttctgtaataaaatgccacagatcatggcttctgtgaaagagcatagaactataaggagataacaggctaaggttaaataaagcaagaaagatgttcaggaaagcaaaaacgcagtagcaggattaaaattcacatcaaagacaatagagtagaactgatacttagacaagatgctgcrcctcagggtgatgtgactgcagactgatcctaccagtacttcaaaacatttagctagtgatattcaggaagaactgcagatgatctctcagtatcctgagaaaatgataaatatgaagtcaagagaatgaagatgacacaactgaataattaccaatatttttgatggagaattcagaaaagttgtaatggaaaaagtaaagatgaaattttaaaaaacattttacagcatttggaaaacatctaggtaagcagatcaagaagacatattcagaaaacatgctggtttgggggaaaaattatttggagacacacagctgctggccaagaaacagcagctcaaaaggaaatcataaattagatatcatggtattacaggcttggtgaactaccgatgtacactgcacccagtttatctcaagaaaaacattttaacaaaacatagcaggttgagctagccacactgataggccttgttttgtggctttctcaatgatgctttaaaaggaaacagtttcatttgaattatttcttttctttttttgaggtagrgtcttgttggactgcagtggcgcaatcttggctcactgcagctttgacctcctgggctcaattgatcctcccacctcagctccccgagtagctagcactacaggcctgtgccaccatgtctggctaatttgtgtatttttttgtagagacagggttttgccatgttgcccaggctggtctcgaactccgggctcaagtgatctgtccgccttggcccctcaaagtgctgggattacaggcatgagccactgcactgacctgttatttcttattttgatggccccaaaaatgggcacaagtaattcttttttttttcctgagatggagtttcactctcgtcgcccaggctggagtgcagtggcacaatctcggctcactgcaacctccgcttcccaggttcaagcaattctcctgyctcagcctcccaagtagctgggattataggcgttcgccaccagacccagctaatattttgtatgtttagtagagacgggttttcaccatgttggtcaggctggtctcaaactcctgacctcaaatgatccgcccgccttggcctcccaaagtgctgatattacaggcttgagccactgtacccggccaagaaattcttctataaaaccctttcagatcactaatagtcttagacagccaatgaaacagaaatacaatttccttatttaaggtgacaaaacaaatatgaccaggaaacagtctggcaagaaatacactaaaatattaaatggaattggttaggtcatgggattgttctttttcaacttgtacttttttttcttctttcttttcttttctttttttttttgtagggatagagtcttactacattgcccaggctggtcttgacctccttggctcaaatgatactctcccttcagcctcccagggagctgtgaccataggcatgtagtcctaccaggcctggctaatttttttttttttttaatcgacaaagttttgctcttgttgcccaggcctggagtgcagtggtgcggtcttagctcactgcaacttttgcctcccagtttcaagcaattctcctgcctcagcctcccaagtagctgggattatgggcgcctgccaccacttctggctaatttttgtctctttagtagagacagggtttcaccatgttggccaggatggtctcgaactcctgacctcaggtgatcagcctgcctcggcctcccaaagtgctgggattacaggcrtgagccactgcacctggcctgcctggataatttttttaaaaatgttttgaagaggtaaggtctctccatgtttcccagtgtggtcttgaacttctgggttcaagtgctcttcccgccttagcctccccaagtgttgggactacaggcatgagccatcatgcccggctacttttttcttaatgtatttatttaaaacttctttttcaaaacagcatatttatatgcatacatgcacagttatatgcttgtaagtaaataaaggtcttcacaatgaagacctaggttatttggaatagaagtggaggagacttactctatacataccttttgtgctctttgaattttatactatgtatataaattaccaattcaaaaaatgaattaaaatataactcataatttaaaaaacatgagttttacaaggtgaaataatataaaagggcttacactatgaagtagtattggctaaaacatccctctcacctggagtcctcatttttcagaggcaatcacttttgactctttctgattttrgttttcctggcatttactttcatttctcaaatatacttttatcactctttcttcgtttattaatttatacattctcctttgatatcctgccacaataaatgaagacttcatttacccaaaagctactcttttccctgccccatagaaatagtagcaggaataagaatactaatagcaactaacatttattagtgcttactttgtgccaggcctctttcaagtaatccacacatactgtctaatccccaccataccctctgaatttacgttaccactcttctcggttttcccattattcattttattttatttatttatttttaagacaggggctccctttgttgcccaggctggagtgcagtggtgcaatgatggcttattgcagcctcaacctcctgggctgaagcagtcatcccgcctcagcccccatagtagctgggactacaagcatgcccctggctaatttctttttaaagtaaaaacaagtttattagagaagtaaagaaagaaaagaatggctactctgtaggcagagcagccccgagggctgctggttggctaatttttaaatttttttgtagagacarggtctcacttcgttgcccatgctggtctcgaactcctggcctcaaatgatcctcctgccttggcctcccaaagtgctaggattgcaggcttgagtcactgtgcctggcccattattcattttattaatcatattgtcaactactggcagcacacgttttaaatgctgatcatagatgatagtattatctaacttttttgtgttttcactaggtgctgtrtattcttaggtcgttacctgtattaactcagtaactcttgtcatcaaacctatggtctaggctctattattattatctccattttataaatgaggaactaaggcataaagtttactctgtataacattgtgtagacaattagtggtaccaagccagtctgacttcaaaacccagtcctttaacccatccatacaccatattgatggtatccctttgattccattttgtaaggtaaattttcattcccactagttccatcatcttttctatgttttctttgtttctttgtttctttcwttttttctttttttaagatagagtctcactctgttgcccaggctggagcgcagtggtatgatcacagctcactgcagtcccgacctcctggactctaacgattctccttcctcagactctgagtagctgggaccacaggtgcatgccaccacacctggctaattgtttcatttttgctagagacagggatctcactttgttgccctggctggtcttgaatttctgggttcaagcagtcctcccatctcagcctgccaaagtgctgggattgcaagcattgagccaccacacccagcctctcttcttttctcatgcttagttttggtcagttatagcttcatgtttttatttcacagaacataaactgtatttaccatgctataatcatagttaaatattttgtgtttgatctatacatggattctaaaagttgaaaacagataataaacaacattttgacatataactatgtaaatattatacatagcaaagccaggagttgagaaatgatctttccttctctgtagttccagtgtatatctcaaatgaattcatccttaagttcacactcaaatggatcactcttttttacactatttgttttttgggtttgtttgttttgagacagggtcttgctatgttgcccatgctagagtacagtggcatgatcacagctcactgcagacttgatcttcgggctcaatgaatcctcccgtctcagcctcctgaatagctgggactacaggtgtgtgccactacgcctggcaaatttattttttattttttatttttgtttgtagagactgtgttttgccatgttgtccaggctggtcttgaactcctgggctcgagctgtctacctgcctaggcctcccaaagtgctgggactacagacatgaactgctgtaccctgccctgtttttcttttgtaacctctctgggttgagtcctttcacatgtagttcctttctcatgttttctaggttccagctttcttcattctgttatatggaaggcactaggctggacattttcagtttgcccttccagatcttaccttttgcctcttctcctaccctgggagactaacatttataggctgctccaactgatatctttgccctctgtcttccagctgggctacaccaatggaaagggtcagcaggaggttggagggcaggagtagagtgagcacagatgtgtattttgccagctccctcccttaagttttgggaactgccccctccctctgctgcaccaggcctaagggatagtaacttagccacaggtccttaaagtgttccttgttggtttcccttgactctgttcacatctttgtagcctctttgtcaaactcttcccagtgacccacttgtgtgtcgtctatttcccgccaggattttgattggtgggaagtaataatattgatatttcttcatataataatgatatttcttcatcaaatgttctttcagaagtttcttgaaatgtctcatctactgattgcctccctctctttttatttctgtatggagcctcgaaagagaagataaaattatatgctcagtccatcgtgtattgcttttttatttgtattactctttttaaaaacaacatctttattgggatattcagatatcttacaagttaccttttggaagtatacaactcagtggtttttagtatcctcacaggttaygtgcacccatcactacagtcaattttagaacattcattatcccyaaaagaaccctgtacccattagcagttattatctttactttttaaatgcgggaaataaacctrcatagaaagaccagaaagactttatgctcttgaactgtataaactgactccagcctacctgttgtaccttttgttgttgttgttgttgttgttgttgttataccttattttctactagttcccataatacatcatttatttaattcaggctgttttcctacttgtgctacaaagtgttattaacttataattgtcgttgcttctcttatatattttatttatctctgtctctgataatctcttaatctcttctttctcttttgcctatccaaatctttctctttgtgaagcatttcctggctactcaagccttccaatatgtaccttaaacatttttcattttaattaattgatttttttttttggagatggagtcttgctgtgttgcccaggctgaacttaaacccctggtctcaagcaatctttccgcctcagcctcctgagtagccaatgtgtcccttttctaaactccttattacttttattcagtgtcatgtaatttagtacttatttgcagttttttctacatatgtgatcatattttctgtctattacaaccaataatcctattaattgaagagatcagttttcacattactttatatggccttcataattattagcacttgatagaataatattagtaggctgggcgcagtggctcacrcctgtaatcccagtactttaggaggccaaggtgggtggatcacctgaggtcaggagttcaagaccagcctggccaacatggggaaaccccttctctacttaaaaaaatacaaaaattaaccgggcgtggtgacgggcgcctgtaatcccagctactttggaggctgaggtaggagaatcacttgaacccaggaggcrgaggttgaagtgagctgaggtcgcgccactgcactccagcctgggcaacagagtgagactccatctcaaaaaaaaaaaaaaagcataatattagtaawcaggttttctccttccattgagtgtcttcacaatatrccttgcccaacagcgaggtgggtgacaccaatagcaagatatcccaatggtgcaaaaggaaagctaaccagaggccgggcatggtggctcacacctgtaatcccagcactttaggaggccgaggcgagtggatcacctgaggtcaggagttcgagaccaccctgaccaacatggcgaaaccccgtctgtactaaaaatacaaaaattagccaggcgtggtatcgtgtgcttgcagtcccagctactcagaaggctgaggcaggagaatcacttgaacccgggaggtggaggttgcagtgagccgagatcgcgccactgcactccagcctggtgacagatagagactccatctcaaaaaaaaaaaaaaaaaaaaaaaatatatatatatatatatatatatatattcattttactattaaacatttgagtgttttctctgttctaaatatttctataggcattttagttatagggatcaatataaatatagcctgtacttcttttcttaattgaaaatagtgctaatggtggtcataggggtactgattgagacagagttgaactagcacaacaaaggtagacagataaacttagagaaaggagtagggggcccagaaacaagaacatgtattttatctggcaaccctaaatagaagagactggctctaaattgataagctgtgaatctgctgatggtacctaggggtcattgtactgttctctctacttttgtgtatgtttgaaattttccatcataaaaaaattaaaagatacaacttaaaaaatagagatacctttcacaaaaacaatgaaaatatgagaccttacagtaatgtgaaccaggaaatataggacctttatggaaagagttataaatgtatttaatgacaatgtttgtaccataaatggaaagaaatgctattgacaaaattagaaaaaatacgaattccccaaattgatctctagatttattcatttaccactaaattcaatgaatttattgctcctttatttttttaaaaaagtggccgggcgtggtggcttatgcctgtaatcccagcactttggtaggctgaggcaggtggatcaggagatcaggagatcgagaccacagtgaaaccctgtctctactaaaaatacaaaaaattagccgggcgtggtggcaggcacctgtagccccagttacttgggaggctgaggcaggagaatggcatgaacctgggaggaggagcttgcagtgagccaagatcacgccactgcactccagcctgggcggcaagagcgcgactccatctcaaaaaaaaaaaaaagtgacctcaatagtacaaatcttgtgaaatgtagttgactctttataatttgattcaagttagctccatgtacctgtagccataccctaaattctttgagacacgactgtcttctagactttgttagagataccttgagtttataaggtttctacaagacagccaaattcttaaattcctttcccaaatctgttttgtcccactgaaaaaaggtacttggggccatctccatctattcacagactttaatgaagaagttttgccctcgaagatgaggctgaattttaattggcatttatggatagcatttctcaattatatattttacagttatgcattagtaattgttgtatctttcaatcttgtaagttcttgaatttgtggattttctctttttcttttcaactccgcttgcagctaattcttttctgagttcatctttttctcattgtattttaagtgtagctaatagcatccagggctagcaacatactgtttcccaacctctttgtataaatcaacaagttcattaatcgtattatctgctttctcagttttctcaggcaaatgcagtgttaccattgcattatataggtcatcattgtttccagccttcagtaacagttacttgctactcagtcgcaattgcaggtgtcacrtatgttacatgtttgttatggcaataacgtactcctattaccagtttctggactagcttttccgaagtaaggctgctgtaacaaccctcaaattgtagtgccttcctacagtaaagatgtgtttctagctcccatgttagctacaagttgtctgtggttttggggcactgttaaatgtgtcttactcagtgttccaggctgaagaacagccctatctttgtcttaggtcagagggaaaattgaaaatgctgaaacactcagtgctcttaattttctcctaagatatgatataaataacttacaattatatttcattggccaaaggaagttaatacggccaggcccaatgtttgtatggtagggagtatttgcctctcaaagactgtactataagtcaccaggttcaaggacagggatgtatatttatcttatagggagaggatagaatagtgcagaacagtaataccatctacatatcgatttctaggtatattttctaaagcagtgtttttcaaacattcagctgagttcttagctgaagataaacatttggaagttgtcagtatataagtgagtgtgaataagatcaccgagggagagggaagagaggaccagaaacctcatgggagaagcatctgcaaagaacactaagaaygacctgtcagagaagtagggaggagaataggaaaagagcatgtcctggaccctagttatagaattatttctgcyccaaaaagtgtaacttttttaaaaaagaaagcctgaatgcaagcatttttcatctgtctggtttgtaccatcacaagacataatttccaaatagaataagaagtttaatattaatacatactcatttactattacagagatttgccacaatatggacagaagcagtggcagtcctattttggaagaacttttgatgtttacaccaaactctggaagttccagcagcagcatcggtaaatgaattttatagttaaaggagagtgaaggcctgttttgtattagtcacagtttttatcttcactacttcagtgctttttgtcttggtgctttttcttttttttcaccaacaaagcaaaggtaaatcttggtgcttttaaaataacatatttcatctttataacccaaatgaaaacaaatttatttctttcctatttatttaagatcttaaaatgtatggccaggcatggtggctcatgcctgtaatcccagcactttgggaggccaaggtgggaggattgcttgagctcaggagtttgagaccagccttggcagcatggctaaaccctatctctacaaaatacacaaaaattagccaggtgtggtggtgctcagctgtaatcccagctacttaggaggctgtggcacgagaatcgcttgaaccctgaagtgggggaggttgcagtgagcagagrttgcatcactgcattccagcttgggcaacagagagagaccctgtctcaaaaaagtaaataaataaataaaaataaataataaaataaggctgggtgcagtggctcctgtctgtaatcccagcactttaggagtctgaggtgggtggataacttgaggttaggagttcaagaccagcctggctaacatggtgaaaccctgtctctactaaaaatataaaaattagtcgggcatggtggtgcacacctgtaatcccagctattcaggagactgaggcagcagaattgctggaacctgagaggcggaggttgcagtgagcccagatcatgccactgtactccagcctgggcaacagagccacactctgtctcaaaaaaggaaaaaaaagagtaatgttcttgtccgatttttaaagacaatattatatgtggaatggttcagatcagctagagcataggtaggatgatttatggtttcattctaaaatatatgtttattggccaaagtagtttctttttatatttcaacttataaatagacatttaataaatgctttttaaatttaatggaatgactacattgaaatctaatgaaaaattcattagctttgctgaattggatggtattttatcctattgaatttacagatttgattagttttggaatttatagactcatttctattttcttgtatcctatataaaacagacaagtcttggataatcggtatggcttgaagcgctggcaaataggagaaattgcttccaagattgggcagctatactatcattattagtaagtaaattacacatggaaagagtaaagtgttgtctgattaaaacacagcatgcagaagtatacatacatagtatactcattgctaggcatgaaaatcacgagttacaaatgaaactctagtagttcggaccagattgatcaagacaatgttgtgcaataaccttccatagtcaaagtactatttgttttaaaggcttgcctcccaaacacttcatttggtcagactcatttataacttaaaaatttgatcttggttttagataaacrattaatactaaaggatttattgttcttgcagcttcacttgtcttaataatgtgtagcattgtattataacttgtatatgtgaatgaatggttttcagaaggatactttaaaaaactcatacttgcaggatatgtttgaaagatattttttattatatccttagagcactaacatctatatagtcccatccctgagttcagaaaacaagaagggtccttttaggaatctaaatgtcatcatcctgaagtgataatcaggtatacaataaaaaaggcttggaccatttgtaatctaaaaggcaataaaatggctgggcgtggtggctcacgcctgtaatcctaggactttgggaggccaaggcaggtggatcacctgaggtcaggagtttgagaccagcctagtgaaaccccgtctctactaaaaagacaaaaaaattagccaagtgtggtggcaggtgcctgtaatcccagctacttgggaggctgagggaggaaaattgcttgaacctgggaggcagaggttgcagtgagccgagatcatgccattggcactccagcctgggcaacaagagtgaaactctgtctcaaaaaataaaaaattagaaaaaagaaaagaaaagaaaaggcaataaaacttcttccatttcctacattttggcataccgctccaaattcccaccactaaaatcactctcttgggtagaatattttcttaaaaagtcccttgtaaaactagaagtgttttctcaggtagaaatgttttcttaaaaagtcccttgtaaaacataattcattaacatcccctgaagattcgtatggattagtgcattcctcagttctgtgaggacagaaattaaagaaatgggccaaaggactgtatggatttgaggaagtggcctagtcctgggagaggatttcactggatggaatgctgtttggagagtcccttcaaagaatgaggataatgtgtaatatgggttggcatcaaaaaaggcttggatgcagcgaggaggtttttaaaaaaatttcattattattttttatacattttaagggtgatatgattattgtcttgccgattcaaatttaggacagtcattcccacccccgcaccccgtgccacagaggaatacagcggtatatagaacaagtatttaccatggtgaagagtctctgacactgtcatatttaaaaatatattttttctcatagcttacgcacatcggaaaccagctatctgaatgaggctttttccttctattctgcaatcagacagagatcatattattctcaagtcaataaagaggacaggtatgtatctgctatgtttttagaaagatgaggataaaacattcagtcttaatcttcgtagaaattgtgtggaaaagcatacatttttataacgtgtactcgtttaccaggctttattgagtgcctgctatgtaatagmccttcgaaagcatagagaagtttatgttacctaagcaataaatatcaaagatgtttaacagatgtcacaatgccaaaggagggttgggttattgttttacaagagattggcttcacacagatttaatagaaaagaaatgactccaaaacaaggcttagctaataacatttattctttagccygtgtaatcttaattcatatctcttcaaaagcctggtgacaactgtcatgtaggaccagggaatagtctgttaatgctgtttgaattttctctctytttttttttttttttggaggtggagtcttgctctgtcgcccaggctggagtgcagtggtgcgatctcaactcactgcaacctccacctccacttcctgggttcaagcaattatcctgcttcagcatcccaagtagctgggattacaggcttgtgtcaccacccccggctaatttttttgtattttttagtagagatggggtttcatcatgttggccaggctggtcttcaactcttgacctcaagtgatccacccgccttggcctcccaaagtgctgggattacaggcgtgagccaccacacccagcctggattgtgatttgattacttccagatgagtatggaattgtggaagaaatcagagatcttctggagaatctttcttgttagtattctgggaactgttggatgagaaagttcaggcacagaaggtctgaatattctctctaccccagcaacacaactcacagtttttatatggtgaaaagattatattctcttagcaatagaagaaaacagttttgacatgtttttctcaagaacactttgtggttgactgttgtaagctttccaactaaacagtgacattttggggaaagccccactcttgtaaatmtccttaatttccttgcatgtcttgttcagacttgtctaggggcgtttgcatggcacatgtaaggggtgcagatgctggagtgtacatttttcatatctttttgtcatccccttacatcagaagttccatcagttacttttcccttaggttgtcctatagtttgcttcacatattttcactacagatatatttcctccaactctaatttttaaaaaaattcttggcgagataaattatatcttaaaaaatgcgaaagagctgtataacattttatcggcattaaaaatacatataagcagagaactattttaagtaatagcaaaacaccttgtataatttacttttctgcattttctaatttgacaaaagggaaattggctttaaccttaatacccaacagtttgatttattgccataattttatgccttaataacaaacatcaaatttgaattgttttcctttgcagttttctagatcagagcatattatttagaagtaggattatttggaatcaggatgacaaaaactcttgctttgtgccagtaaattagaatcaaaggacaatctggtgtgcaaaaccttgaccttgctgtgtgtagttaggaggggctttgttcagtttgtaggttgtttcttagtttacacagggtaagagtgctagtcaagattgcaatcagcaacagctgctaaaatcaagagccaggagagaaaaccaataaggaagtattccacaatttcacagttcatttaaaaggcaaaaatcttcactcctcaaaaggaacaagttctctctgcactgtcttgacagctaaggattatgtcgagaccaggaggaataagtagtttgttccagcaacctcaaggttagtgtctgtcactaagcatagaccactcccagaacatctcattccatgggtccatcctacctaggagaggagatattacatacagccactcctcctaggagctgcacaccccaattctgttgcaaatggccaaagctgaacctggttggatatggagaaggtgaagattctgaatacccaagaggttttgtggagatgttacggtgagccacctggaagaacagagtttcctaggcaaatgtatagttaaagagtcagtgtcttgtaagtagggagcctagcaggttggacaaggctagaattctggagtccagaagtttgttaagagcttaaaaaaaatggccgggtacagtggctcacacctataatcccagcactttgggaagccaaggcaggcggatcatgaggtcaggagatcgagaccatcctggttaacatggtgaaaccccgtctctactaaaaatacaaaaaattagccgggcgtggtggcacgcgcctgtagtccgagctactcaggaggctgaggcatgagaatcgcttgaaccggggaggcggaggttgcagtgagccaagatggcgccactgcactcagcctgggtgacaaagtgagactccgtctcaaaaaaaaaaaaaaaaacttcataaaaagccttcaattttacattcatatttcccactggacaaaacttgatactgtcaccacttatgttgacgttgacaacatgtcaacatgtcatttattgttcagaagaaacaataaaaggtagggggaaagtgaataataaaattatgattattacaatagaaggcaggaaaggaaaataaactccagttatgttgatgtcaacataagtggtgacagtatttttttcagtgggaaatatgaatgtaaaattgaaggctttggcactgatgataaagagggcttgatgtggacccttgcagtgagtcacactcttttttctgcagtttgatatggagtcagttggtaggctaggggttgtggttcaggttatcgggcttgattgaggtggcctcttatgtatgagtggacagcactgacgcatttaatctgtgctttgctgcagttcatcacagtggcttccaaaatagaaagcacccacccacttctgtakgcttattgaatataaggatcagctaactatggcctgtttgcatgccagattgggcccatggcctgtttttgtactgtgtggcagtttagaatttttctttytttttttttacattttcaaagggttgtaaaaagggaaaagatgaatatgctacaggcaccaaatgtggcctgcaaagcttaaaatatttaccatctggccctttgtagaaggtttgctggttgtataatccatgatayagattcatagaacctattttttaatcaaaaaagtaacagaattaagtcattcatatttcaagtttgaattgacatcatccttctactaattttctttgttttgaattccactttcgacaatatgataggctagataacctgaaatactaaacacctagaaatgctggataaaataggacaatcatccttttaaatggaaaacttagttgtcaagaaagtaaggaagtccctagttcattttcccatggctgtggtgaccttggagggtggggcaattggtttgggtgacataaaagagcaaggaagaagaaaattgaaactagaaggggaaggtatgatatacaagaaggattggtaagaaaaaattatccccttgtattctaaaacatcgatttgatggggcagtaatcatcataacaatggctgattgacattattaaaataaaatggagccaaatctagataacaataatatgaaagaagaaaggggataaagaattaaaccattctgatatccatttattcttcagaagaaacatagagtaaagtttacttgttaatattttcagaaaactataattagaatgtgtaacttcagaagaggtagagggggaaagtgagtaacaaaatgatgatcattacaatgaaaggcaggaagggaaaataaactccaaaaagtataattagcrcaaaataataaaatagaaacaaatccgaatcatggtaagtaaaaatgatctaaacttccctgttaaagacaaagattatcagtatgcctcttagaaaaacccaataatatactgtttttaagagactcttcgaggccaaragcrgtgactcacacctgttatcccaacactttgggtggctaagatgggaagattgcttgcggccaggagttcaagaccagcctgggaaacgtagcaagacccgatttctacaaaaaataaaaataaaaaaattacccaggcatggtggcacacacctgcaatcctagttactcaggaagctgaggtgagaggattgcttgagcccaggagtttgaggctgcagtgatttatgatggtgccactgcacttcagcctgggaaatagggcaagactgtctcttttaaataaataaacccttcaaagatgtaaggtagacagagaaagataatgagacagctactatggggaagaaatgtgtacgtgtatacgcatttcttatgtgtatactgtgtgtatatttaaaggtagaaagtattattgagaatagaggtttactctgatgaaaggaacaattcaggaaaatataaaaatcataaacttatatatacctaataacgtagcattatgataaagcaaagtgtttttttaaagtggggaaattaatgatctgatgtacatgggaatttttgatatatgatatctaataatttatatatcaagacaagaaattataagatttgagtaacaagtttgttccagtgtacctaaaattgtgtgcaacagtatatatgttattttcaaacttatatgaaaatctgtgaaattaactgatacttgccacaacacaagtttaatacaaggttcaataaagtgtgtgttgtctaaccatggtacgatttcattaaaaacaaaaataaaacataatttaaaaaaatcagtagctgcatttgcaggccagctactcagaaggctgaggcaagaggattccttgaacccaggagttcaagtccagttgggcaacataacaagactccatctcttaaacaaaaaaaaagtcaataagtttgtcaatcaatagacacatttctaagtaactcatgggtcgaaagaattttttaaaaattttattatggaaaatgttgaacatacacacaaaaaatacactgttgtaaggctattatttgtgatgtaggatatggaaagcaggaggaaatgtcaggtttgaattgatgattggtaagtgtaaagtgttatgtgtgaacagataaaatatattgtaagggcatttgataagttaaaggatgcacgttgttactcctagcaatcacttaaagaacaataacaaagaagtagtataactaggaagccaatagatgatataaaatggaacactaaaaaatatttgattaaccgaagagaaagcacaacaggaacaacagaggaacatagcaagagaaggagcaagtaggaaacaaatagcaaggtgrtagatataaacctagccaaagcaataatgacattaaatgtaattggtctaaaaacatcaagtaaaaggcacagagatcatattttcctgcctgtagtcttccacgcttcgttgtattcttaacttaaacatttaytactttctttaggaagccttttctcacccaagatctagtcctgtgggcacaaatagcattctttatttctcctatcattatattattccgttgtgttgtaagcatttatctctctcctgtatattttaagttcttttctgtctgtaagatctttgaagaagggaatatctctagttttttacaactgtgcttttagcaattaacagtatctgatgcatctaagttctcaataaatacttgttaaatgaatgaatatatgagtaaacagcttaataaatcagtaagaaatattttaaaaagactatatgcttatatgtgggaatgtttataattgtgcagaaaaggagggaaagagttttaaaagctatcagaaaattaaaaaaatcaaaaagcattcttttttaatctaatgagtaatttttcatttatcttccatagacctgaattggtagttaagaagttacgatattatgcaagatttatagtagtttgtcttcttctcaacaaaatggatgttgtaaaggatctggtaaaggtaaatacactttaaatagttcaaattctaatctctagttgtatatggatgatcttatttttaaaaaacagattttaggttaaaataattttgatatatcaataattacaatattcaaagtatagtaacttctgacaagggtaatgataaaaaaattttccaactcttttcatgttacaaatacactaatctgagataattatcttgattccttgcttttgtcctttctgcatgttttacatttcaaagcccatcagtggatggctgggaatgcaaacaaacaaaaattcttagtttaagagaaaataattgaaatgttatgtgaagaaaaagtacataatgctttacaaaggccttgcaaatgattttcattttcccaccactttagagtgtctgcataaagtctctccttcattaactgaggtgattaagagttaactgtcttcagacccacttaatacctgtaatcattgcatattaaattctgattgcattctgtattcaatagtttcaatggcatacttaattttgtatcaagtataacatgccagttggttttttgggttttgtggggttttttttttttctttttttttttttgagacaaggtctcgctctgtcatccagctggagtacagtggcatgatcttgtctcactgcaacctctgcctcctgggctcaagcagtcctcccaccttagcctcctgagtagctggaatcataggctcaagccaccactcctagctaatttttgtgttttttgtagagacagggtttcaccatgttgcccaggctggtctgaaactcatgagttcaagcaatccgccagcctctgcctcccgaagtgctgggattacaggcatgagccaccgtgcccagctcaacatgccagttttgacaaggccaccagaagtagctctctgttctccttttctaccttcctttatacccagttaccattaaaaatatttccaaaaaccatataatacaaatccaaataaagtcaggaagtatttttagaaatatataattttttgtagtggtagggtctcactatgttgcctaggctgctctcgaaatcttggcctcaaatgatcctcccacctcgacctcccaaagggctgggattacaggtatgagatactgcatccagcctcatttttttttattgttaaaatttttgaatttctcttttctgattctttcattaatgaattcattgctcatgtagtactgataggaagtagatctctgtaaagactttatttgatgggtgttattctgaagtttgtacttttgaagaaaatttattagttttcatctttgttttttgttataatcaggactgtgtattgctaataatcaaattttgtaagtatgtcggtttctgtcaggaatatggttctatatggctgtgtgtttttatgggttttttaataaccttttttgtgatgtttttaaaatcaggaattgtcagatgaaattgaagattatactcaccgatttaatactgaagatcaagtggaatggaacttggtgcttcaagaagtagcagctttcattgaggtcagtttttgataagaaaaatcataattattgataaataaatgaccgtgtagtttatgtttttattgtgtgtatatgtcaagaagaaggaatagcttactctattgatatttagtcttggccattygttaagttcttattgcttttttctttaggcggatcctgtaatggtattaaatgatgataataccattgttatcacatcgaatcgccttgctgaaacaggagccccattgctggaacagggcatgattgtgggacagttgtctctggctgacgcactcattattggtaattgtaataatcaggtaaagaattgtgaaggaattatgcttaaaattcactgtgaaaaatagtgctattgatgatcacagaattattttcttataaatatcctaacatcctcttgtgaggaaattgctgattaaattatgctgtgtgcatatatggaatatattacagatatttaaatagcttagaaagaatttttaataacatagaaagatactcgtgatacagtaaatgaaaataaacttgccatggagccaggaagcagaattatttcatatatgttagaatgtctatatgtatgcacacaggaaaaagacgaggaagaaatgttacaactatctaagttttatctccaaataaccaaattataggggatttttattttattttttacaacattctaaagtttccaaaatttctgacctggcacagtggctcacacctggaatctcagcactttgggaagcccaggtggttagatcacttgaggtcaggagttcaagaccagcctggccaacatgacgaagccccatctctactacagaatgcaaaaattagccagccatggtggcatgctcctgtaatcccagctactcaggaggctgaggcaagagaatcacttgaacctgggaggcggaggttggagtgagccaagatcacaccactgtactccagcctgggtgacagagcgagactctgtctcaaaaattaataataataataaagtttccaaaatgtatatgtcctactttccaatcaagcaaaaaggggcgaggagttggtgttttttgtgttttgtttttttttgagacagagtcttgctttgtcactcaggtgggagtgcagtgtcatgattttggctcactgcaacctccatctcccaggttcaagcgattctcctgcctctcagcctcccaagtagctgggattacaggcacataccaccacacccggctaatttttgtatatttagtagagatggcatcatcatgttggccaggctggtcttgaactcctgacctcaagtgatcctcctgcctcagcctcccaaagtgttgggattacaggtgtgagccaccgcacttggccaggagttgtttttgggtaaatttgtcaaaagtgaatttcaaatgttttttcatgacagagtagcaccatgatgatgagatttaatgtactagaaatgaaatttactggaaattacaccagtgaatacatttttctagatgtgttttttatacaagtttaattttggatcctatcctagcatctatcaatcacttttgttattgttaaatttttctggtatttctccatttttggcttttatgaccattattttgcaaatgtctacaacgtttttgaaattatagtawgaatatactaaatggaaatattttgaaacatttatggtttgtatagttatactatcttaaggctcggtatttttctcacttttttttaattcaaagaaaatttttctaatcagaaaaatataaattaaaaccaaatgagatatcaccgaactagatgactaaaaacaaaagagaccaagaaactgataatagcatatcctggcaactagtacaagaactgaatatttcatactatgtagaaatagaaattgatagatttactttagaaaagtgtcaggcattatctagtacagctccatatgtgcacactctatgaccaagcatttccagtattttcttattgatctgtaagagttctgaatatattctacatgaaagtcctttgtcagatttatgtgttgaacyatcttctcctactcttgtcttgccttttactctcttctgatatcttctgtctctttttctccttttctttaaacatctgttaaaatatttattagtatctacgctatgccagacgcccctgttccagatactgagattccagtgaacagaagtccttaattttaatgtagtctaatttataatttttttcctttctggtattagcttttttgtgtcctattttgagaaatcattgcttaccttacctttcatatttagatctatgatatctttgggatttattttagtgtgaagtatgggtcagattttctttctggatttccagtagacctagcaccatttactaaaaagaccatcttttccctgccacactgcagtgtcacttttatcataaatctgatgttcaaatatatttgagtctcrttctgttcctttggtctgtttgtctattatgctgatacttctgacttcattattatggcattttaataggcctcgatatattgtagtaaatgaaatactgattttttctaattttttctcttacattgattctgattcttatttccttcttcctattttgaatttaatttgcttagataactgacatttatttatttatttatttatttatttatttatttattgagacagagtcttgctctgtctcctaggctggagtgcagtggtgcaatctcagctcactgcaacttctgcctcccaggttcaagcgattctcctgcctcagccttcctagtagatgggactacaggtgtgtgccaccacgcccggttaattttttgtattttttttttgtatttattattttattttattttattttattttattttattatactttaagttttagggtacatgtgcacaatgttcaggttagttacatatgtatacatgtgccatgctggtgtgctgcacccattaactcgtcttttagcattcggtatatctcctaaagctatccctcccccctccccccgccccacaacagtccccaaagtgtgatgttccccttcctgtgtccatgtgttctcattgttcagttcccacctatgagtgagaagatgcggtgtttggttttttgttcttgcgatagtttactgagaatgatgatttccaatttcatccatgtccctacaaaggacatgaactcatccttttttatggccgcatagtattccatggtgtatatgtgccacattttcttaatccagtctatcattgttggatatttgggttgattccaagtctttgctattgtgaatagtgctgcagtagacatacgtgtgcatgtgtctttatagcagcatgatttatagtccattgggtatatacccagtaatgggatggctgggtcaaatggtatttctagttctagatccctgaggaatcgccacactgacttccacaatggttgaactagtttacagtcccaccaatagtgtaaaagtgttcctatttctccacatcctctccagcacctgtttcctgactttttaatgattgccattctaactggtgtgagatggtatctcattgtggttttgatttgcatttctctgatggctagtgatggtgagcattttttcatgtgttttttggctgcataaatgtcttcttttgagaagtgtctgttcatgtccttcacccgctttttgatggggttgtttgtttttttcttgtaaatttgtttgagttcattgtagattctggatattagccctttgtcagatgagtaggttgcgaacattttctcccatcttgtaggttgcctgttcattctgatggtagtttcttttgctgtgcagaagctctttagtttaattagatcccatttgtcaattttgtcttttgttcccattgcttttggtgttttagacatgaagtccttgcccatgcctacgtmctgaatggtaatgcctaggttttcttctagggtttttatggttttagatctaacatttaagtctttaatccatcttgaattaatttttgtataaggtgtaaggaagggatccagtttcagctttctacatatggctagccagttttcccagcaccatttattaaatagggaatcctttccccattgcttgtttgtctcaggtttgtcaaagatcagatagttgtagatacgtggcgttatttctgagggctctgttctgttccattgatctatgtctctgttttggtaccagtaccatgctgttttggttactgtagccttgtagtatagtttgaagtcaggtagcgtgatgcctccagctttgttgttttggcttaggattgacttggcgatgcgggctcttttttggttccatatgaactttaaaatagttttttccaattctgtgaagaaagtcattggtagcttgatggggatggcattgaatctataaattaccttgggcagtatggccattttcatgttattgattcttcctacccatgagcatggaatgttctttcatttgtttgtatcctcttttatttcattgagcagtggtttgtagttctccttgaagaggtccttcacatcccttgtaagttggattcttaggtattttattctctttgaagcaattgtgaatgggagttcactcatgatttggctctctgtttctctgttattggtgtataagaatgcttgtgatttttgtacattgatttttgtatcctgagacttttctgaagttgcttatcagcttaaggagattttgggctgagacaatggggttttctagatatacaatcatgtcgtctgcaaacagggacaatttgacttcctcttttcctaattgaataccctttatttccttctcctgcataattgccctggccagaacttccaacactgtgttgaataggagtggtgagagagggcatccctgtcttgtgcccgttttcaaagggaatgcttccagtttttgcccattcagtatgatattggctgtgggtttgtcatagatagctcttattattttgagatacgtcccatcaatacctaatttattgagagtttttagcatgaagcgttgttgaattttgtcaaaggccttttctgcatctattgagataatcatgtggtttttgtctttggttctatttatatgctggattacatttattgatttgcatatattgaaccagccttgcatcccagggatgaagcccacttgatcatggtggataagctttttgatgtgctgctggattcggtttgccagtattttattgaggatttttgcattgatgttcatcaaggatattggtctaaaattctcttttttggttgtgtctctgcccggctttggtatcaggatgatgctggcctcataaaatgagttagggaggattccctctttttctattgattggaatagtttcagaaggaatggtaccagttcctcttgtacctctggtagcattcggctgtgaatccgtctggtcctggactctttttggttggtaagctattgattattgccacaatttcagagcctgttactggtctattcagagattcaacttcttcctggtttaktcttgggagggtgtatgtgttgaggaatttatccatttcttctagattttctagtttatttgcgtagaggtgtatatagtattctctgatggtagtttgtatttctgtgggatcggtggtgatatcccctttatcattttttattgcgtctatttgattcttctctcttttcttctttattagtcttgctagcagtctatcaattttgttgatcctttcaaaaaaccagctcctggattcattaattttttgaagggttttttgtgtctctatttccttcagttctgctctgattttagttatttcttgccttctgctagcttttgaatgtgtttgctctcgcttttctagttcttttaattgtgatgttagggtgtcaattttggatctttcttgctttctcttgtgggcatttagtgctataaatttccctctacacactgctttgaatgtgtctcagagattctggtatgttgtgtctttgttctcgttggtttcaaagaacatctttatttctgccttcatttcgttatgtacccagtagtcattcaggagcaggttgttcagtttccatgtagttgagtggttttgagtgagtttcttaatcctgagttctagtttgattgcactgtggtctgagagatagtttgttataatttctgatcttttacgtttgctgaggagagctttacttccaactatgtggtcaattttggaataggtgtggtgtggtgctgaaaaaaatgtatattcagttgatttggggtggagagttctgtagatgtctattaggtctgcttggtgcagagctgagttcaattcctgggtatccttgttaactttctgtctcgttgatctgtctaatgttgacagtggggtgttaaagtcacccattattattgtgtgggagtctaagtctctttgtaggtcactcaggacttgctttatgaatctgggtgctcttgtattgggtgcatatatatttaggctagttagctcttgttgaatcgatccctttaccattatgtaatggccttctttatctcttttgatctttgttggtttaaagtctgttttatcagagactaggattgcaacccctgcctttttttgttttccatttgcttggtagatcttcctccatccttttattttgagcctatgtgtgtctctgcacgtgagatgggtttcctgaatacagcacactggtgggtctggactctttatccagtttgccagtctgtgtcttttaattggagcatttagtccatttacatttaaagttaatattgttatgtgtgaatttgatcctgtcattatgatgttagctggttattttgctcgttagttgatgcagtttcttcctagcctcgatggtctttgcaatttggcatgattttgcagtggctagtaccrgttgttcctttccatgtttagtgcttccttcaggagctcttgtagggcaggcctggtgatgacaaaatctctcagcatttgcttgtctgtgaagtattttatttctccttcacttatcaagcttagtttggctggatatgaaattctgggttgaaaattcttttctttaagaatgttgaatattggcccccactctcttctggcttgtagagtttctgccaagacatccgctgttagtctgatgggcttccctttgtggtaacccgacctttctatctggctgcccttaacatttcttccttcatttcaactttggtgaatctgacaattatgtgtcctggagttgctcttctcgaggaatatctttgtggcattctctgtatttcctgaatctgaatgttggcctgccttgctagattggggaagttctcctggataatatccgcagagtgttttccaacttggttccattctccctgtcactttcaggtacaccaatcagacgtagatttggtcttttcacatagtcccatatttcttggaggctttgtttgtttctttttattcttttttctctaaacttcccttctcgcttcatttcattcatttcatctttcatcactgataccctttcttccagttgatcgcattggctcctgaggcttctgcattcttcacgtagttcttgagccttggctttcagctccatcagctcctttaagcacttctctgtattggttatcctagttatacattagtctaaatttttttcaaagttttcaacttctttgcctttggtttgaatttcctcctgtagcttggagtagtttgatcgtctgaagccttcttctctcaactcgtcaaagtcattctccgtccagctttgttccgttgctggtgaggagcygcrttcctttggcggaggagaggcgctctgctttttagagtttccagtttttctgctctgttttttccccatctttgtggttttatctacttttggtctttgrtgatggggatgtacagatgggtttttggtgtggatgctgtttctgtttgttagttttccttctaacagacaggaccctcagctgcaggtctgttggagtttgctagaggtccactccagaccctgtttgcctgggtaccagcagtggtggctgcagaacagcggattttcgtgaaccgtgaatgctgctgtctgatgttcccctggaagttttgtctcagaggagtacctggccatgtgaggtgtcagtctgcccctacttggggggtgcctcccagttaggctgctcaggggtcggggtcagggacccacttgaggaggcagtctgcccgttctcagatctcaagctgcgtgctgggagaaccactgctgtcttcaaagctgtcagacagggacatttaagtctgcagaggttactgctgtctttttctttgtctgtgccctgcccccagaggtggagcctacagaggcaggcaggtctccttgagccgtggtaggctcgacccagttcgagctttctggctgctttgtttacctaagcaagcctgggcaatggcgggtacccctcccccagcctcgctgctgccttgcagtttgatctcagactgctgtgctagcaatcagcgagactccgtgggtgtaggaccctccaagccatgtgcgggatataatctcctggtgcaccgttttttaagcccgtcggaaaagcgcagtattggggtggaagtgacccaattttccaggtgccatctgtcactcctttctttgactaggaaagggaactccctgaccccttgcgcttcccgagtgaggcaatgccttgccctgcttcggctcgcgcacggtgcgctgcacccactgtcctgcgcccactgcgtgctccctagtgagatgaacccggtacctcagatggaaatgcagaaatcacccgtcttctgcgtcgcttaccctgggagctgtaggccggagctgttcctattcggccatcttggctcctccaattttttgtatttttagtagagacagggtttcaccgtgttaaccagaatggtcttggtctcctgacctcgtgatctgcgcaccttggcctcccaaagtgctgggattacaggcgtgcctcctcgcctggccaactgactttatttttatttttgagacagagtctcactctgtccctcaggctggagtacagtggtgtgatcttgactcactgccacctctggctcctgggttctagtgattttcctgcctcagcctcctgagtagctggcattacaggcatgtgccatcacagtggcccagctaatttttgtatttttagtagagacagggtttcgccatgttggccaggctggtctcaaactcctagcctcaggtgatctgcccccagcttggcctcccaaagtgttgggattacgggtgtgagccactatgctctttttcctcttctagtataaaaatccctgggctgggcgtggtgactcatgcctttgggcatggtggctcatgcactttgggaggcaaagtggggcagatcgcctgagggtcaggagttctagaccagcctggccaacatggcaaaatctgatctctacttaaaatacaaaaattagtcaggcatgatggcatgtgcctataattccagctacttgggaggctgaggcaggagaattgcttggacccaggaggtggaggctgcagtgagcccagattgcaccgctgcactgcagcctgggcaacagaagaagactccgtctctaaataaataaataaaataaaaatccaaagctgtaaaattctctttaagcattactttaattttattctacatattttgatattttgtattttttccaatcctgcttcttctataatattttatattttatattttctttcagttgaatgtattttcttatttcttttttaactcttactgacagtatattgcacatctccaacttgagtttgataattttttttcagcactttgaagatttaatttcattatcttctctcatttctgttgagaaattgtctgttagatttattagtcacatattatatccacttaaggaaatgtttctttcctctgtgtgtttttaagattttctcactttctttgattctttgcagttttactatgttatattcaggtgcagttttctttatttatcctgcttgaggttcacagagtttcttgaatctatgggtttatgtctttcatctattttgaaatatggttattatgtctctgagtattgtttcccttctgttctttctctgctccacttctaggactcagttacatgtttgtagacccgttcacagtgccacgtgtgtctgttatattcttttctgtatttttcatcattttttcctctctaggtttaagttaggctgttttctgttgacttcttttccatttcactaaccatatcttctgatgtgtttaatctgctatttaaccttttattaagtttcatatttcacatattgtctttcttagctctggatttttccatttgattcttgttttatagattaaatttttttttcctagcctgggcagcatgatgaaaccccatttctacaaaaaatacaaatatcaggccaggcagtggctcatgcctgtaatcccattactttgggaggcctagctgggtagatcacttgaggttaggagtccgagaccagcctggccaacatggtgaaaccctgtctctactaaaaataagccaggcatggtggcttatgcttttgatcccagctacttgggagactgaggcaggaggatcacttgaactctggaggcagaggttgcaatgagacaaattcgtgccactgcactccagcctgggtgacagagtgagactctgtctcaaaaagaaaaaaataaagggccgggcacggtggctcacgcctgtaatccctgaactttgggaggccgaggcgggcggatcacaaggtcgggagatcgagaccatcctggctaacacggtgaaaccccgtctctactaaaaatacaaaaaattagccgggcatggtggcgggcgcctgtagtcccagctactccggaggctgaggcaggagaatggcgtgaacccgggaggtggagcttacggtgagcagagatcagaccactgcactccagcctgggcgacagagcgagactccgtctcaaaaaaaaaaagaaaaagaaaaagaactaaaaaacaaaccttagctggatgttggtcatgtgcctctagtcccagctgcttgggagactggggtggaagaatcacttgagcccgggaagtcaaggctgcagtgagccatgattgtgccacacacttcagcctgggtgacagaagcagaccctgtcttaaaaaaaattttttttttttctttttagagacagtatctggctctgtcatgcaggtgggagtgcagtggcacagtcatggctcactgtagccttgacctcccaggctgaagtgatcttcctgcctcagccttccaaaaatgtttatgttttatagagatggggtgttgctgtattgccaaggctggtctcaaactcctggcctcaagcagtccttctgccctagcctcccaaatgttgggattataggcatgaaccacggcacctggcccttttttattttttagtagattttaattctctggcagaattctctatttcttcatttgtgttctaccatgtctattttgttgatcacacttagtagttattttaaagtccttttctgctaactatactctctagttatgctaactacaagtgtgttggtctgttctattgcttgtttctcacttttaaaattatcatattaatatttataattactatatatctgataatttgcttgcatattaatttataatcaaatcccccagcattctctttcttttctttttgttttgagacagtcttgctctgtcacccaggctagcatgcagtggcatgatctcggctcactgcatcttctgcctccctggttcagttgattctcccaccacaaactccccagtagccaggactacaggcacgccctacgcgcccagctaatttttgtatttgttagtagagatggggtttcaccatgttggccaggctcgtctcaaactcctgaccttaggtgattcacctgcctcagtctcccaaagtgctgggattacaggtgcgagccagcacacctggcctcagtttttacatttcatttattgtattttttatttttaaaagtataggtcaggtgcagtggctcacacctgtaatccccacactgtgggaggccgaggcgggcagattacgaggtcaggagttcaataccagcctgaccaatatggtgaaaccccatctctactaaaaatacaaaaattagccgggcgtggtggcgtgcgcctgtagtcctagctactcaggaggctgaggcaggagaatcacttgaacccgggaggcagaggttgcagtgagccgagatcgcgccactgcactccagcctgggtgacagagcgagactccgtctcaaatgaatgaatgaatgaatgaatgaatgtattaggttattttctacatattcctttgattggcttaatcatgattttaattacttcttctatttaagcatatgaaactaactttttttcttttaagagaccggggatgggggtgtgcatctcactatgttgccccttctttaatcccygcctcttggctggtctccagctcctggcctcaaatgatcctcccaccttggccctccaaagtgctgggattacaggtgtgagctgccacacctagacttttgcatgttatgtatgatgtttgtatcatcctgtttctgtttgctgaatcaggcgtgccttttttcttcatgcgttttatgatttttgtttctgagtcttctttgatgtaattctgtcagctagaattctgtaagacctgaattgaggatgccttcttccaacgaagatctgcattgctttttccctcaaaacttgggggcagtatcagtttttgttctttttaagtgaaaaaccttatagatttttcagccatgcaaataatgttaattcagattctcaaaccacatgagaatcagcatatggccgtgaattcttgggggagacttttcttgatctcttctcagaacaaaggctaaggtagagtttccttcatgtttatgtctctggagcagatttgtttctagtgttctcctctgaggccatatctttttgtgcatccagttttatttgggcataggtgtatgtgtgggaggggccatcttccaaccaaccaaccagttcttagccaggaggcccatgctacccttactacaggaaaacaaggcattagtgcccacttatctccttaaacctcttccccttctttaatccccgtctcttggctgggcgcagtggctcatgcctgtaatcccagcactttgggaggccgaggcaggtgggtcatctgaggtcaggagttcaagaccagcctgaccaacatggtgaaaccccgcctctactaaaaatacaaaattagctgggcatggtggcacatgcctgtaatcccagctactcaggatgctgaggcaagagaatcacttgaacgtgggaggcggaggttgcagtgagccgagattgcgccgttgcactccagcctgagtgacagagcgaaactcacatacatacacacacacgtatattaaatgagttaaatgtttgaaagtgtagttagtaatcttcataaacttattctcatcttaactaaataattcctcttcttttatttgatagaaacatgttctttaaaaaattctcatctgttttattatcatgtgtgttcctgaagttctatataagtattactgaaattggaaaaggatatagacttaaatattgtgtagtgccaaaatgtatggaagaaattactataaaatatggatcataggctgggcgcggtagctcatgcctgtgatcccagccctttgggaggctgaggcaggaggatcatctgaggtcgggagttcaagaccagcctgaccaacatggagaaaccccatctctactaaaaatacaaaattagcctggtgtggtggcgcatgcccataatcccagctactctggaggctgaggcaggagaatcgtttgaacccgggaggaggaggttgcrgtgagccgagagcgcgccattgcactccagcctgggtgacgagaatgaaactccatctcaaaaaaaaaaaaaaaaaaaaaaaaaaaaaatatatatatatatatatatatatatatatatatatatatatggatcacagttgtatttcagcatagctaattcatcaaaagttagctcttttttctcatgtagcaaggattactatcaaacttctgtgtatagaattcgggctgaaaagtcaggaatcgtggcttatgcctgtattcctagcactttgggaggctgaggtgggcagatgacttgaggtcaggagtttgagaccagcctggccaacatggtgaaaccccatctctgttaaaaatacaaaaattagccaggtgttttggcacacgcctgtaatcccagctactccagagactgaggcaggagaatcgtttgaacacgggaggcagatgttgcagtgagctgagattgtgccactgcactccagcctgggcaacagagcaagactctgtctcaaaaaaaaaaaaaaaaagaatttgggctggagatccttgtggtgttagtgaaaaacttgcccctcacatagcacactacctacacgtgtgaattcatccaccagtctgtggaggttaacatgtttgtagaacctaatatagtctctgtgctgctgctgctttattttttttgagacagagtctttctctgttacccaggctggaatacgatggtgcgatttcggttcattgcaacctccgcctcctgggttcaagcgattcttctgcctcagcctcctatgtagctgggattacaggcatccaccaccacacccggctaatttttgtatttttagtagagatggggtttcaccatgttggccaggctggtctcgaactcctgacctcaggtgatccacctgccttggcctcccaaagtgctgggattataggcgtgagtcaccatgcatggccccctgtgtttctgtaactacttaaaaaaacaaaacctgaggaagtttattgattagtaaacatgtatatggctggagaggtatgtgaaaaagcaaatataaaaaatgcttattataggatctagatgatgaacatatggatgtcactgtagaattcttccagtctttccatcgcttgaaaatttctgtaacgaaatattagagaaaaaggtacccaaagccctgaagtacatgtgaaagtcacaactagtaacgtgataaaagtctttaaagtctgcgtgttgcattaaggctaggttgtgtttgtttttttttttcttgcaggttaagttcagtgaactaactgttgacatgttccggatgttacaagctctggaaagggagccaatgaatttagcttcccagatgaataaaccaggaatgcaggtaatctcctcttttacatttgcaagtttggtaaccctctggctgcgtctctcctgttggaacgctgattattcaacagatactacagccttgaataaagaattcacttgatgagacatggagaaatagatcatcacagtaagactgagtgtgaaaataagacttccttgataagggctagtgaaaatagatattgataattcatttgtcaaatgcagcttttatgtataatgttttctgtgtgtaaatataggaatcagctgacaagcctactagacgagaaaacccccacaagtatctgctctacaaaccaaccttcagccagctatataccttcttagcagcgtcttttaaggtatgtgtgatccagtactttttactatgaggtgaaagtgtgccctaactaaaatctaagagtcactcttttgaaaaaatacttaagagtttaggtaaaatataaaaatgaaaaactgcctttagagtaatgatcctgataatagatatttttgttttgttttgtttctttttttttttttgtactcctggtaagctgtgaaatagctgtttgggaatgaaaattgcttatgatgttgtgattattcccatcattaattaatgataatagtggttctccttcctccagttttttattactcaatgattttaggtgtaacaatgcagaattggccaggcgtggtggctcactcctgtaatcccagcactttgggaggccaagccaggtggatcacctgaggtcgggagttcaagaacagcttgaccaacatggagaaaccccatctctactaaaagaatacaaaattagccgggtgtggtggcacatgcctgtaatcccagctgcttgggaggctgaggaaggagaattacttgaacccgggaggcggaggctgcggtgagccgagatcgcgccattgcactccaacctgggcaacaagagtgaaactctgtttcaaaaaaaaaaacagactaaaaaacaaaagcagagtgtctaggcttcttatatagtcaaggagctctatgaaacatttagatcatctgaaagaactgtgagaaataggagaattcttcccaaagtctatgtagagaaagccacagaagggactttgtcttgtagccatgtagtcaggatctttacttctccattcaagttttcggagaatattctccaaatgatggggtttttgaagcagagaatgtctttgcaacttttgacaatatagattaataatgaatctctgccgtgtgtatagttttaaagtcaggaccaagaagagcgtttcttctcttggaaaagacaacagtgcattcttatttatttcacaactttaagatgtcatgaactttaaataaaaccatgttgtttatccttgtttgttgttttgtgtatgtgattttctttcatttcaggagctgcctgccaatagygtgcttctgatttacctgtcggccactggcgttttccccacaggtcgttctgatagtgaaggtacaataaaggaatgctccctgttgtgagcagggcttgaattctctttattttctacaagacgatggcccgtagcccacagaccatctcagcctttctagacagacttccaaatttgaaacctggtctatttgttgattgataattttgtagataccccagtctgtcatattttctgaaatgttatatgtcaaagcccataaatcatcagaaaattcatatattaaatgcttgcttcactatcaaatgtatcaaaagcataatatgtaaatacatttagatatacataaggagtttggtgtttcaaagttgaaaaggatgatggaataaccaagcgtaatgatctatttcacatcattgaatttttctgagctttcagtgcattggggaatccggtcaatggctacatgatggctgaaagtctttgtagaaatcagtgtactttcgtaactgtgaaagttcaagcccttgtcatgattttgttttctgtcctttattttgttttatggattcaatctgtagaatatcgggatgctgtttcagaataaaaacgtaacactgtccagaacataccagtccagaaattggtcagaatagataagtaacttggatgtaaataagataattaaatatttgcctgggcaaaataaaaaaataaaaaaattcttaacatccttaacattttcctcttcatttgtttgttgaaatttgcattcctttataaaatgcatgtccttgccatcttccttgcatgacctccagattctcttaaaatgttgaaatgaaaacaaatctctttagccttttcattgcagtgatttttttaagaagtgaaatataatacaacattaaaagtaatgtaaaatcttaaactactttagttttttgtaataatgttagtacttttatttataattatctgtatgtctcatatactgttaaatcaagttttcttggtttccgcttaacatactgacttctttacttttttcaaagtatgataggtaatcgtactttgataggtcctttgagagagattatctgaacatcccacagttgctgttccatttggacaagagtttagctaattcatatgaatttagtgggaaaaggctaacttcagaaccagaactaaagtgcttgatacaatagtgataataatggatatttgcacgctgaaatctggcaatacattcttaaaggtgaagtttttgtgaatgagaattttcaaattctattcaaatatttttctaagttttacagttagtggctcatttaaaattgtatttacttatgagactaagatttcattctttaaaaaaaaaaaagcttattttattctgcaacttctttttttttttctgagacagggtctcactctgtcatgcagactggagtgcaatggtgtgatcatagttcactgcagcctgggaatacaggcacctaccaccatgctcggctaatttttaaaatttttttgtagagacaggtctcactatattgcccaggctggtctggaactcctggcctcatgcagtcctcctgcttcagcctcccaaagtgctgggattacaggcatgagcaaccatgtctgaccaacttccttttaaaataatattgttaaacctgagattttaagtttgcttgaaatgtaaaggtcattttgaacatcccagatctccattccttttattacttagaataatgatgccatagagtcttgttttgtttctcattatattctgtttgaagaactgctgaataattaaatgttttttaaaatgttgaaaatgacaacatactgaagtcatttaaatactccattaaattaaaatgttaaattttaaaataatttaaatgtgtaattatcttcgcttgaatcaatgagagattcacacagtacctttgtatttgaacatcaggtcagtgttagtcttcaactgaagtctaggattcttccctttgtttttataggtccttatgattttggaggtgtacttactaatagtaaccgggatattattaatggagatgccatccacaaacgaaatcagtcccacaaggaaatgcactggtatgtattctggtgtctactcttattataaaaattatacctctgtctataaatagaaaaaatattaagtaaaatggggagttttttctagtactagaatgattcccttagactaagatttagggacagaccagaaacacttatttggattccagcaataattcaggctctgtctatcctaggaaattagaacttttggttgatattcattgaataaatatgttacacactgtttagtcactagggatatgtcagtgaacaaaattgcattctagttggagacagtaaatatatacataaataaataatatgtcaggacattatacatgtaacatcaatacgaacttttaaacaaatttttttcttgagatggagtcttcctctgtcactcaggtcagtcttgatttcctggccttaagtgattctcccacctcagcttcacaaagtgctaggattacaagatgtgagccactgtgttcagcccaaacatttttttttttttttgagatggagtcttgccctgtcacccaggctggagtgcagtggcatgatctcggctcactgcaacctctgcctcctgggttcaagcgattctcctgcctcagcctcctgcgtagctgggattacaggcaccagccaccatgcccggctaatttttgtatttttagtagagatggggttttaccatgtttgtcaggctggtcttgaactcctgaccttgtgatccacctgccccggcctcccaaagtgttgggattacaggtgtgagccaccgtgcccggccacattttattttattttatttttttaattgaaaaataatcattgtaaatattcctggggtacttaatgatgtttctatatttgtaatgtattgtgatcagatcagagtaattagcatacttatcatctcaaacatccattccttgtgttgggaacatttaatatcttttttctagctatttatgataaaggctgatagcagtggctcacacctgtaatcccaacactttgggaggccgagatgggtggatcacttgaggtcaggagtttgagaccagcttggccaacatgaaaccctgtctctaccaaaatacaaaaattaaccgggtgtggtggcttgcgcctgtggtcctacctactcaggaggctgaggcaggagaatcacttgaacccattaggtcgaggttgcagtgaactgagattgtgctccagtctgggtgatagagcaagactctgtgtcaaaaaaacaaaaaagagaaaataaaaactatataacatattattaactatagtcatgctacagtggtatagaacactagaacatattccttctatctagctgtaattttttaatctttaacaatctcttccctatacctccgttccccgttcccctacccttcccaacctctagtattgagtttgttttttttttgagatggaatcttgctctcatgcccaggctagagtgcagtggcacgatcttggctcactgcaacctccatctcccaggctcaagtgattctcctacctcagcctcccaagtagctgggattacaggtggccaccaccacgcctggctaatttttttatttttcatagagatggggtttcgccatgttgaccagtctggtctcgaactcctgaccttagcctcggcctcccaaagtgctggaattacaggcatgagccaccgcgctgggcctgaattttttaatacaaggttttgttggtttaatatagcacaaatgaatgttgttacatgattacaaatagaacttcaggccaggagcagtggctcatgcctatgatcccaacattttaggaggctgaggtaggaggatcacatgaacccaggagtttgagaccatcctgggcaacttagtgagactctgtctctacaaaaacttaaaaaaaaatttttttaaatgcaaaaaatacaaaagcaaatagaatttcatctacaaaagttctttttcttttttcttttcttttcttttttttttttttttgagacagagttttactctgccgcccaggctggagtgcagtggcactatcttggctcmctgcaacctctgccttccgggttcaagcgattctcctgcctcagcctcccaagtagctgggattatagtcatgcatcaccacacccagctaatttttgtatttttagtagagatggggtttcaccatgttggccattctggtcttgaaatgctgacctcaagtgatccgcctgctttggcctcccaaagtgctgggattacaggcgtgagccaccgtgcctggagttcattctttttctaagcataacaacttcattgcttgggctgttattggctcattggctctagaatttttctagctgagagcaatctggttataaagaaaactggactggtctaaaactttgtttctaatacatattgaatatcccttatctgaaatatgtgggaccaaaagtgtttcgggttttggatttttccagattttggaatatttgtatatagatagtaaggtaccttagggatgggacccatgaaattgacttgtgtttcatatacaactcatacacattgcctgaaagtaattttatttttccctttgagatcctggataaactatgtgttgtgcacctgcatgactatgatccatcatgtgaggtcaggtgtggaattttctacttgtggcatcgtgttggctctgaaaactttttggattttggagcatttttcgttttggattttcagattaggaatactgaacctgtatggcatgatcacttatatgtggaatctgaaaaagttgcactcagaagcagagtgcaacggtagttctgaggagctgaggattggggaaaatagggagatgttggttaaagggtgcagcctctcagttgtaagataaatatcatttaaagtacagcatggtggtgataattaaaaatactatattggctgggtgcagtggctcaggcctgtaatgtcagcactttgggaggccgaagtgggcggatcacttgaggtcaggagttcgaaaacagcctggcaacatggtgaaatcccatctctactaaaaatacaaaaaattagccgggtgtggtggcatgtgcctgtaatcccagctacttgggaggctgaggcaggagaattgcctgaacgtgggaggcggaggttgcagtgagccgagatcataccactgcactccagtctgtgtgacagagcgagactccatctcaaaataaataaataaaaaaaaataaatgaaaatactgtattgttggaccgagcatggtggctcattcccgtaatctcagcactttgggaggctgagatgggaagattgcttgagttcaggagttcaagaccagccttggcaacataagaggatcttgtctctactaaaaatgtaaaaaatgagccaggcgttgaggtgcacgcccatggtcccagctacttgggagactgaggcaggagtatcacttgagcctgggagatcgaggctgcagttagctatgatcttgccactgtactccagtcttggtgacaaagtgagaccccatctcaaacaacaacaataacaaaaattgttgtttactcgaaattttctgaaagagtaaagcttatgtgtcctctctgcccactgcccccagcaccacccccccacccccgccccaccgcccacacacacgaagggtaacggtgtgggaatggaggtgttgattaatttgatcgtggtaatcactatacatgtatgcattaacaagtcatcacattgtataccttgaatatatacaatttttatttgtcaataaaagaaaaacttttatttgaaatataatgaagtttgatgatattgctcagtgaaacattcataaatttacatttacattagtatctatccacatatgcacatcgtgtactcagtcatcggaaagagcacgcacaccaagattctgaccttacgcattggctctcacatgcatgttactggatttccgcctttgggttcagtagctcttctgtgggccagtcaaactgcatgtttaacaagcccttgatgcaaatgtttagaggaaacatatggtaaaaagtagctgggcacagtgactcatgcccataatcctagcactttgggaagctgaggtgggcagattgcttgagctcaggagttcgagaccagcctgggcaatatggagaaaccccatctctactaaaaagagaaaaattagctggttgtgttggtacatgtctgcagtcccagctactcaaggaggctgaggtgggaggatcacctgagcccgggacatggaggttgctgtgagctgcgattgcacaacaccactgtactccagcctgggccacggagcaagacggtgtctttaaaaaaaaaaatagtgatagtaaaaagattttcctacttactacctgcagtattaagatgtagcctgaaatattaaaaatctttaaaatagaaattttgaagactcattgaaatacaaatctggttttgttattacatcttgtttccagatgttcttacaaggagcttttaaatatgaaacaggtatctgtttgccagcttctgaggttttcatgctgtgtgtttagtcatctttaaatacacagacttcactttagcttagatattcttgaataacaattgtctctgaacttttttttttttctccaaatagaactatcttggctatcctagtaaatacaggctttttttcccctttgcttaactagtctttgtttttctctcagtgctatgatgcaaaggagatatgagcagaccaaactgaagaataagatttctgagatgtggctgacacagtttaacagttcttcrttgttgttttcccagccttcatcccggggatctctatcctttcaccaggaagccactgttcatcattgtggattcgtctaatagtgttgcgtataaggtgagttccatgagagctattgcacaggtagacattgtggcaccaacccaagggtacccactcttaatgtgtgcctttttattttgctttattttatttaattttacacagtttgtatttagtgtttcttttcttttgaggttgtgcatgctagtcaggatcgggtgctatgaatagaaacaagaagaaaacgcatgaatggacactcagtggaaaataataaatcctcctgcaggaaaaaaaaattcaagatttccaagatctctggtgggaggtttatttttgttatataacccagaataattttcttttatagaggtagaggtataagggtgaatttctctagtgttcaaacgtttccccttctcatgctgagctgctgtagtttaagtaaaacttctagcccatagttttagtctttgaatattaacatactgttttacatgcacttgattttttgaaaatttgtgacaatcacaaaaaaaagatggccctgaatgctgaaataagtgacagggatctaacttgaacatccttcgttttatatttcactattgaagtgatgattttcagtgattttataaagaatgccagtggtcagctgggtgcagtggctcacgcctgtaatcccaacattttgggaggccgaggcgggcagattacctgaggtcaggagttcgagaccagcctaaccaacatggagaaacccccatctctactaaaaatataaaattagccaggcgtggtggtgcgtgcctgtaatcccagctacttgggaggctgaggcgggagactcacttgaacctgggaggtagaggttgtggtgagctgaaattgtaccattgctctccagcctgggcaacaagagcaaaactccgtctcaaaaaaaaaaaaaaaatgccagcagtgaaacactttaaaggtggatattataattcaaactatagtaatttacaggaaaacgaaagcacagtctttagagtcctttgtatctggtcaaaatgtttgattagtgaaaaatgtgttcaaaatattctgggtgcacagatctgccacttcaaactgtttctgttgtgggtgttcatactgcagttagagggagaagcaaactcctgataggtttctatcaggaaaccaatgaaaatgtctggtagccaagagagctgaccccaagtatacattttccatttagttttcatgtttagttttacttaaactctttattccaagagcttccaatgcaccatacatttttcagcatttttcctcctactcattttgttcagtattacaacttctgatttttaggaaagttagcagtgtactttcttttcttttcttttttgagacagagtttcgctcgtttcccaggttggagtgcaatggcatgatctcagctcactgcaacctccgcctcccaggttcaagcgattctcctgccttagcctcccaagtagttgggattacaggcatgcgccactatgcccggctaatttttagtatttttagcagagatggggtttctccatgttgctcaggctgttctccaactcctgacctcagatgatccacccgccttggcctcccaaaatgttgggattacaggcgtgttccaccgtacccagccagcagtgtactttcttaaattgtatatttgttttgtttttgtgggaaatggaagaatgtgagargctgctgaatgaaaaggtttattggctaccccaattaaacttataaagccagaggggtccaggcattttgtgtcttcacagaattcaaaagaagtactctgtctttgtcaatgaaaatgaatttgttgcagcagtttggtgatgtgacagaatgtgtttttgcactgggtccaatgtattgtttaacatgatctagcatcattgagagtactttagcaatccattagtttctcccaatttaattgggcattattggataccacttctcagcaataccattcattgtatgtgcctgctatttccagaggactatttagatttaggatgaatgttggatgccgacttttaaagacaccattgtgtataattggaaatgtatttgctcaagtaatgcatcatggcttaattttagattttaatattgtgatgcacaggacagctgtggaataatagcaagtcttttgttgttgttgtttgcttttgatggcacaggcactgtcactcctctgaagaaataaatcgtccagaacataccaatcttcagaaatgaaaagggaggccaggcgtgcagtggctcatgcctgtaatcccagcactttgggaggctgaggcgggcggatyacttggggtcaggagttcaaaaccagcctggccaacgtggtgaaatccygtctctactggaaattaaaaaattagctgggaggggtggtgtgcacctgtagtcccagctacttgggaggctgaggcaggagaatcgcttgaacccgggagatggaggtttcagtgagccaagatcgtgccattgcactccagcctgggtgacagagtgagattctgtctcaacaaaaaaaaaaaagaaatgaaaagagaaccccatatggagtaggcaaatcagatcatggcacagaccaattttagtctttttagaaattaatattacttactacatttaatttaagcatgtagttctctttggtagcatataaaggtgtctcatatttatttttcccacaaaagcatttgtaggctgggtgcagtgtctcacacctgtaatcccagcactttgggaggccaaggcaagaggatcacttgaaccagcagtttgagacaaagctgggcaagatagcaagatcccaaatctattttaaaaatttaaaaattagccaggcatgtttttgtgagcctgtagtcccagctacttcaggaagctgaggcaggaggatctcttgagcccaggagttcaaagatgcatgagctgcgatcgtgccactgcattccagcctgagtgagagagcaacaccgtatctctaataaattaattagatgaaatgaaattaagcattgtaaagtcttaagctaccactttgcaagttttttggtttgttttgtttttgttttttgtttttgagacagagtcttgctctgtcgcccaggctggagtacagtggtgcaatcttggctcactgaaacctccgcttcctgggttcaagcgattctcctgcctcagcctcccaagtagctgggactagaggcacacgccaccacacctggctactttttgtgtttttagtagagatggggtttcaccatgttggtcaggctggtcttgaactcctgacctcgtgatccgcccacctcagcctcccgaagtgctgggattacaggcatgagccaccatgcccgacctgcaagtttttaatgagaaaagagaactgggtaactgatgtattatttctggagtattttctttgctatatatgttttatataggtctggatgttttatgagtatrtaagtgttttgtaaatgtttcttcatttaaacagtttcatgtacatttcttcatttaaatattactcgttaatttttttttttttttttttttttttttgagacggagttttgctctgtcacccaggctggagtgcagtggcatgatctcggctcactgcaacctccgcctcctgggttcaagcaattctcctgcctcagcctcccgagtagctgggattacaggcatgtgccaccacacctggctaattttgtatttttagtagagatgggatttccccatgttggtcaggctggtctcgaactcccaacctcaggtgatccacccacctcggccttccaaagttctgggattgyaggcatgagccactgcgcctggccacttgttaatgtttatgaagtaactcrtgcatatagtttaaagttgtatttctcaactatttctgtgcatcagaaactttcagagcccttttcgaaccacttgtagctgggtcccatccacctcctgtgattctgatcacttcacctggggtgggtctcagctacagtatttatgaagactagctgtattgtgctgtcctggtgagagaactactcactcagaaatccctccagatttgctactaaaaacagcagtctcccactttttgttgcaacccctatttgcctcttcccagaggccgctcttcaaatagtttttggctattttgttttttaaccaccatttttcttttttcttttttccttccttctctcccctaaccactatttttctaaataatatactggcattgataattcttgattcttcagttttagcgttatgtattaatttcccactatgaaagagaaatttatctccctttcctctttctgtccccaactcacatttctaccctttccatcattttatccacaccatagataattttgatagataatttgttttgttttgttttgttttagagggaggctcgctgtgtcacccaggctagagtgcaatggtgcgatcttggctcactgcaacttccgcctcctgggttcaagcgattctcctgcctcagcctctctagtagctgggattataagcacgtgccaccacacctggctgatttttgtgtttttagtagagacggggtttcaccatgttgcccagactggtcttgaactcctgacttgaggtgatccgcctacctcggcctcccagagtgctagaattacaggcgtgaaccaccgctcccagcctagcttccagtatttctttttttttcttttttgagacagagtttcactcttgttgcccaggctggagtgcaatggcgtgatctyggctcactgtaacctctgctccccaagttcaggccattctcctgccttagcctcctgagtagctcggattacaggtgcacgccaccacacctggctaattttgtatttttagtagaaacagggtttctccatgttggtcaggctggtctcgaactcctgagctcagatgattcacccaccttggcctcccaacgtgctgggattacaggcgtgagccatcgtgcctggccttttttgtgtgtgtgtgagatgcagtctgtcagccagactggagtgcagtgatgtaatctcagctcactgcagcctctgctccccaagttcaggccattctcctgccttagcctgctgagtagcttggattacaggcacgcgccaccatacctggctaattttgtatttttagtagaaacggggtttctccatgttggtctggctggtctcaaactcctgacctcagatgatttacccaccttggccttccaaagtgctggaattacaggcatgagccatcgtgcctggacttttttatttttatttttttgagatgcagtctcactcttgtcacccaggctggagtgcagtgatgtgatatcggctcactgcaacctccgcctcccaggttcaagtgattctcctctctcaacgtcctgagtagctgggattacaggcgcacaccaccacgcctggctaattttttgtatttttagtagaggtggggtttcaccatgttggccaggttggtcttgaatgcctgtctgggcctcccaaagtgctagggttacagacgtgagccaccatgctcagcctgagccacggcgccgagcccaatatttcttaagaagcatgaagcattctaattctgttttcttttttatgcaacacattttcagtgtctggaaacgtatagaatcttctctttcttcttagtgatttttcagtttctcaatatcgtttcctggtttgactttacttttttattttttaagatggagtttcactcttgccaaccaggctggagtgcagtggcacgatcttggctctctgcaacatccaccacccaggttcaggagattctcctgcctcagcctcccgagtagctgggattacaggcatgcgctaccacacccagctaattttgtatttttttagtagagatggggtttcaccatcttggccaggctgttctcgaactcctgacctcgtgatccacccgcctcagcctcccaaagttctgggattacaggcgtgagccactgtgcctggctggtctggatttacttttaactatggtgcttaacatgtacttggtgaattatttcagtctggaaactgctcattttctagagttagtccatttatttttctctctgcattttcttttttcctgttctgtcttttaagaacttttttcgttattgcacattctggtctggttgtcttttatttgtttgtctgtcctttgctctttaatacattttttctttaggaaatcccctcatctttatcttctaagccttttattgagatttttcatttgtctattttcctttcatatatatagaaatagatgcatgtgtgtttatgtaacacatacatacatatgcacatatatatataattattttgggtttttttaaatcatggttgaaatatatcactttcctttgagaatatcagtgatcatttaaaatttctccctgcctcgtatctgcttcctctttcttcatttgtttctgcttgtttttgcctctgtctttctcattagagacttccctgagagtatcataatccctgcttgtttgctcatacttaagattggagcctagcaaactgatcagaagctctgaggggtgattccaactgagctctgggactggttccaactgagctggaccttatagttgggtaatccctaatgccagtatctttaggtcttccttcatggcctggtcatgtatatcagagaagatgcaactattccacctggaatatmaaggtctagtgaccagcatgatgccatgttttccctgaagcgtgtgtgtatgtgtgtgcatgtgtgtaggtgttgtgtgtgtgtgtgtgtgtgtttatagatacatatatccttacccagtgcctcacacttaaaagagtgtttgtttgtttgtttgtttgttttttgagaagaagtctcgctctgttacccaggctctagtgcagtggcatgatcttggctcactacaacctctgcctcccgggttcaagcgattctcctgccttagcctcccaagtagctgggactacaggtgtgtgccaccacacccggctaatttttgtattttttagtagagacagggtttccccatgttggccaggctggtctcaaattcccgacctcaagtgatccactcagctcggcctcccaaagtgttgggattacaggtgtgagccaccatgcccggccaaaagagtcttaatcagtgcatgttgaatgatgaaatgagggagctattgtccttattttgtacttgaggaaactttgcctctgaggttcaggatcttgtctaatatttccaacaccagtctttctcattgcagtgcccatgctctttcccacgtagggaaagagtagcttttcaggcttgtctgagcctcatattagaggaatactgtgattgaaataccaatatttgtgtaacaagtatggcccatattttggctcttagattgccagtaggggcaaactaagcaagttgattggccttgtctgtggtaatgtagtatttagtaggagtttaaaataataataataaaaaaaagccatccaggtgcagtggcttacacttgtaatcccagcactttgggaggccgaggcaggcggatcacaaggtcaggagtttgaaaccagcctgaccaacatggtgaaaccccatctctactaaaaatacaaaaattagctaggcatggtggcacatgcctgtaatcccagctattcaggaggccgaggcaggagaatctcttgaacctgggaggcagtgagccgagatcgcaccactgcactccagcctgggcgacagagcgagactccatctcaaaaaaaaggccctcagtcattttgggcaatacttctttttcttttttcccctggaagaagaaaatccttttgcacatttaagtatttatgacagagctagctggatccctgcctgtgaaaatgacttacagatttgtcaaaacaggagtatttatctaaacagcctcatcctaaagtatttgactgatgtctacagcaatcagtttcttaaggcattcacaacaggattcagttatgtaagagctcttctgccagtcagcctcaccytcattccatttctctcttgctgctttgaaagacctttttgtttttgctgtcctgcagttatatggtgatatatctaggtttggcttaaatctattgggatttgttggacttcctgaggtggtaggttggagttttttgttactgctgggaaattctcattttctcttcacatatcgatggtatctaagcttctctctcctcaccttatggagctccaattaaatatgtgtattagacattcacactgtgtcctccacatttcttaacctctcttctgtctgtattttccatcattttgtttctttggttgagatttgtatagtttcttctgatctagctcttagttcaaaaattttctcttcagctgtgtgtaacttgctctcaaacccatctattgagttttttgttggttatggtatttttcatgttgataaattatatgtcattcttttttaagtattccattgcccttttctattttattttatttttgagacggagtctcgatctgttgcccaggctggagtgcagtggcgtgatctcggctcactgcaatctccgcctcccgggttcaaacgattctcctgcttcagcctcccaagtagctgggactgcaggtgcccgccaccacacccagctaattttttgtatttttagtagagatggggtttcaccatgttagccaggatggtctctatctcctgacgtcgtgatctgcctgccttggcctcccaaagtactgggattacaggcatgagccaccgcgcccggacactccattgccctttttatagtttcttattttcaagtttatttcttatttcttcaaacttaataagcatacttattatttgttgtctgtgtgatattttctataatcatatatgaaattggaatttcttttttttttttttttattgagacagagtttcactcttgttgcccaggctggagtgcaatggtgcgatctcacctcactgcaacctccgcctccccggttcaagcaattctcctcagcctcccaagtagctaggattacaggcatgtgccaccacgcctggctaattttgtatttttagtagagacggggtttctccatgttggtcagggtggcctcaaactcccaacctcaggtgatctgcccgcctctgcctcccaaagttctgggattacaggtgtgagccaccgtgcccagctgaaattggattttctatatgaaatctgattttgctgtttgagacatcctttgctgtttttgtgcccctgtatgcttgattatttttgactatgtttcttcttcttcttcttaaaaattacttgtatgaagttcatagagccctaggatgaggatacctttattcagagagggtctgcatttgcttatgccagacacccagaggcactaccagtttgggatcacctagttgatagaaatctgggctgcaaatatgcaggagggctgacttacactgacaaccctcaggaactaatttttgttttcttttgttttctgctcagcatcaagaaaaaatgttttgcagtcccatgtggagtgatcatggaagggagaggaagtgtcaagtttggttttggttaatccttatactgacagtatagccctttaggattccaggttaaagggtgtacccttttaggattccaatttaaaggctgtagccctgaggattccagtttaatgcagggcgagttttctattagattcccatcttggacagatgctgagctgtgacatttgtccccttttccagatgagatcttcaaaacccaaattcaagttgctagattgattcagggcaagagttctggaatctgcatatcctttcagtctcctctacagatttttctgtatctctctgcccttttatcagtgaagtgcccttgagttcagtccttgttcttttccacctacagctgacttcctgatgttcttagctgattttatggctttgctgtttctgtgttgacaacctccaagccagacctctctctcaaactcaacttgaatattatctacctactccatatctttagttataatttagttggtagagtttgcaaactgaacatgcccaaggcggaattcctaggctcttccatatacagctttccccattttagttcatggctactatgctattatagttgccccggccataatccttgatttcgtacttgactactcctcccctcacatccaacatccattttaggaaatcctgttgactcgaactaatatgtatatccaagatcctattacctcctctgcctcatcctggctcataccaccatcatcattcacctgaattactgcagtagccttctaatgagtcttcctccttcctcgctctcctgtaagtgtgcctataagacagatatgccacctttctactcaraatcaccaatggcctgtcatctcactcagaagaaaggctttattttttctgcttacatatacccctccctccccagtcttccaaaaacatctctgatcttctctcttccctggcccctgattgctcagttctcttcagccacactgacccccttgctgttcctgaaacatatcaggcagtcatctgccctagatctttacattcttttccctctgccttgaatgctcttccaaagatacctacattattctttaggtgtttgagcaaataaagccttttaaaaggtcttccctaattgtcctacttaaaattatatgcctccccagtactcctcatccacctttctttttcttaataatcataacagttaacttttctgtagtgactagcaatatgcactgttctaagcattttatgtgtatacgtttaattcctgcacaacacagtgtgttgcttttattgttcccattttactgataagaaaaccaaggcacagataaaggttaagtaatttgcccaagatcacacagatagtaggtagccaagttggaatgtaaaacaatggactgtaaaacctgtgctattaactatgtgctgtgcttccatatgtagcacttgtcaccttctgtgatattatataacttatttatttagttggttagtttactgtgggtcacaatctaccatttctccatcccccatccaactcagctctaggccgggcacggtggctcacgcctgtaatcccagcactttgggaggctgaggcgggtggattgcctgaggtcaggagttcgagaccagccttgccaacatggtgaaaccctgtctctactaaaaatacaaaaattagccgggtgtggtggcacatgcctgtaatcccagctagtagggaggctgaggcagggagagttgcttgaacccgggaggtggtggttgcagtgagctgagatcgccactgcactccagcctgggcaacagagtgagacatcatctcaaaaaataaaaataaaaataaaaaaatacttacataaatgtcagctccagaagatagagttttttctgttttgtttactgttgtatctctagcacctgtagcagtgtctagtccttaggtccatgagttatttgttgaagaagagaagaagagatctttaaaaagaacattatatactgttttaagtgaatgcttttttttttttttttaagagacaggttttcattctgtcacccaggctggagtgcatggagtgcagtggtacagtcatagctcactgcagcctcatactcctgggctcaagagatcctcctatgtcagcctcccgagtactaggactacagaaacatgccaccacacctggctaatttttaaattttgtgtagagatagggtcttgctatgttctccaggctgatcttgagctccctgctgtaagcgattctcccaccttggtcttccaaagtgctgggattatgagccaccacacccagctagtgaatatattttaaaccccagttaaagaaataatttcctaggcaaaagattgaatggctatatgaaagaaatcagaacagccccatcactggctagaaatgtaggaaagttatcaaaattatttccttttccccmcaagaaaggcttctagcccttctgggtttaccaataatttttttttttttttttttttttgagacagagtcgcactctgttgcccaggctgggatgcagtgacatgttctcagctcactgcaacctctgcctcccgggttcaagtgagtctcctgcctcagcctcccaaataactgggattacaggtgcatgttaccatacccggctaatttttttatttttttatttttagtagagatggggtttcaccatgttggccaggctggtgtcgaactcctgacctcagatgaaccacccccctcggcctcccaaaatgctgcgattacagacgtgagccaccgtgcccggcccaataatactttgaaacctttagagtcagatatacaatttagggcaatgaaaaaggtcagaactatccaattcattctgtagcagttaggccacaaaatacttgtatggctttgatcatgtctttgatcttttctgagctgctttttccttctcaaataagttgtgaatgctgatctcacaggattgtcgtgattgcagattaagatctatgaagcctagcgtagtttctggaaaatagcactcagtaaatgataggaattattatgataatgatactgtttccagacaaaattagcacacatgaaagaaaactttaccccaaagtagtttatcaatatagaatagaagaatttaaataaaatactagccaataggctattaatagaatcatctatcaaaagagtttatctgaatcatgcatgaagattaggtaaaggaaaatcaggccaggtgcagtatctcacgtctgtaatcccagcactttgggagcataaggcacgaggattgctagaggccaagagttcaagactagcctgagcaatatagcaagaccccatctataaaataaaaaactagctgagtgtggtgccacgtctgtgcagtgctagctacttaggaggctggggcaggaggattgcttgagttcagaagataaagactgcggtgagctatgatcacaccactgtactcctgcctgggttacagagcaagaccttgactaaaaaaaaaaaaaatttaatactataaactatgtcgataggataaataagacaatcacatgctttcgtaacagtcatttagtaaaatctaataacactcatcacgtgttcttaactaaagcactgaacctatgatgaagagcttctttattaaatagccaacgttgtacttagagaaacactaaaagtatgttcaattaaaataagaaaaagagaatgcctgttactatcattatgatacactattacttttgtcccaactagaaattcataacattccccaaataaaacaataacaagagttgttcggattagtagaagaggacacaaaacagtaaatattggaaagaatgagatgaaaaccactagttgcagacggtatgattttatatttggaaaatcaagagaatcacagaaaagctactaatatgaatataaattcatcaaagtggttagatataggacaaacatacaaaattcaatagcaactttatatatgagctatgtctggttcaaatttattcatttgtatatatttgctataatttttcttaaacttaatagctttgaatcgtacacttcatctgtgtgggcagttatgatatattctgcaaaaacttgcaaataaagattataagattatcctatgggagttaaactataaaattaattaatgaatagatcagaacagagtaaagccacatgtaaagcaccttaaagaaactatttctcaggcctaaaatttaattataatctgatagaaggtattcatgtatttatgtcagaggtctccaagatgattcccaggttcagtgatttcctaggaagattcacaggactcggcatatagtcgtactcactgctaagatttagtacagtaaaaggatacagagcaaaaccagcaaaagaaaaagataagtggggtgagtttggagaaaaccaagtacaaacttccaggggccctcttccagcggagtcacacaggatacacttaattacccaaccaacaagttgtgacaacatggattaaatattatctaccagcaaagctcattaggaactcagcaaccagggtttttattgggaactggtcttgtgggcactctctgcctggctcttaacaaaatgctacactcccagaaggaaagcaggtgttcagtataaaccatcttgtttgcacattctagggacagcgagccactctttatcagttctgctaatggtaggaattttcaccaaaactaagttcccagaagccagccaggggccaacccaataagcaaaactttcgaaggatggcagtctggcttgctatgctaactcttctctgcacagtattattgggggaaaaaaaaaaaagtcaggagagaagttcgttagcaaggagtgcaaagaaaaaggagacctttagaaataaataatagcaatgtccattttagcactatctaagaggaaaagcgacatggctaagatccctaaagccatctttagggatctgtagtgcagaaaatgcctcaatctgccttatcaaaagaatcattcaatttactccctgtgtttggattacaaaatatttctaatatatctgaattacttgcttaattttttttttttttttttgagacggagtcttgctctgtcacccaggctggagtgcagtggtccgatctcagctcactgcaacctctgcctcccaggttcatgccattctcctgcctcagcctcccgagtagctgggactacaggcacctgccaccatgcccggctaatttttttgtgtttttagtagagatggggtttcaccgtgttagccaggatggtctcgatcacccgacctcgtgatccgcccgcctgggcctcccagagtgctgggattacaggcgtgagccaccgcgcccagcctatttgcttaatatttttagtactggtattacattcacaaagtcacagaatcaaaaatttcaagaagtcatattgtgaaatctcttcctcccgcctagtcccaatgcactaaattcctatctctccctatagataatcactgttacctgtttcttatccttttagaaaaaaagttgtaaatggatatacaaactaaaacaaatagtcttttttttatttttattttttgagatggagtcttcatctgttgcccaggctagggtacagtgacatgatcttggctcactgcaacctccgcctcctgggttctagcaattctcctgcctcagcctacctagtagctgggattacaagcacacgccaccatgcccggctaatttttgtatttttagtagagatgggctttcaccatgttggtcaggtcggtctcaaattcctgactcaaatgatctgcctgcccttggcctctcaaagtgctgggattacaggcatgagacacaccatgcccagccaagaaatagtctttagttttcttagttatataaatagtagtaacatcttgtaccacattgcaccatatcttttttcatttaataagaagtattgaggctgggcatggtggctcacacttgtaatcccagcactttgggaggctgaggcaggcagatcacttgaggtcaggagttcaagaccagcctggtcaacatggcgaaaccccgtctctactaaaaacacaaaaattagccaggcacagtggcattcccctgtaatcccagctactcaggaggctgaggcacaagaatcacttgaacctgggcagcggaggttacagtgagctgagaggtggaggttgcactccagcctgggcgacagagcgaaactgtttcaaaaaaaaaagaaaaaaagtattggtgacccttcatacctgttcataaagaacttctttgttcttttttatagctgtttattattccattgtattattgtagcataatttattgtaccaatcctgtatttctggtcatttggttgtgttatttccattccttcactatcactaacaaggcttcaaggaataatttaatacttacgttattttattagttgcatagtgtatctatagggaaaatttctagtttgggaatttctgtgttaatatgcatttgagtgtaatagatgctgccaagttaaattgtcttctaaagtgtttatatcaatttatactcctattacctacatatgartatttccccacattcttgccaamagtgtatattctcaaacttttagaaattttgcttaactgatagggtaaaaatggaattttgagatggagtctcgctctgtcatccaggctggagtgcagtggtgcgatcttggctccctgcagcctccgcttcccgggttcaagtgactctcctgcctcagcttcctgagtagctggaattacaggcatgcgctaccacgcccagctaatttttgtatttttagtggaaacggggtttcattatgttggccaggctggtctccactcctgacctcaggtgatctgcccacctctgcctcccaaagtgctgggattacaggtgtgagccaacgcgcctggctragaggctctttcaatattatgagattaatcctttgtaatgtgagttccagatattttcttcagttcattatttgacttttgattttgtttatgctatattttaccattcataagcttttgatttttatgtaactaggtttatcaatcatagttaatcataacaggagagtctaggtaaaaaaaataattatttttttcaccacttttattatttaattttttacatttacatctttgatatatttggaatttgtcctagtgtgtggtatgaagtatggaaccaactttcttttagatggctattcagtttttccagccaatctgaggtgtcattattatgtgtacataagtcctaaatgttttggagtctaattctggacttttcattctgttccattggtttcctgcctactcttgtaccagcaccactttaattactgacgtttttcttytgttatgttttgttttgttttgttttttgttttgagacagggtctcgctctgttgcgcagggtggagtgcagtggcacaatcagagctcattgtagccttgacctccctggtgcaagtgatcctaccacctcagcctcccaagcagctgggactgcaagcatgtaccaccacatttggctaatttttctattctttgtagagtcggggtctcactattttgcccaggctggtctcaaactcctgggctcaggtgattctcccacctcccaaagagctgggattacagtcgtgagccactgtgccgggsctcactgaggtgtaaagtatgtttcaatatctgatgagtctagttccccctctgctctttttcagagttctcttggggaatccagtttttccatatgaactttagaattacttttttcaattgtaggaaaaaaagtctgtggttatttttattgaggttggtttaaattttaataagttagtgtaatgacattttagaattgttttatctctaagaacatagtatgttttggctgggcgtgctggctcatgcctgtaatcccagcattttgggaggccgaggtgggtggatcgcttgagctcatgaatttaagaccagcctgggcaacatggcaaaatcccatctctactaaaaatataaaaattagccaggtgtggtggcatgcacctgtagtcctagctactggggaggctgaggcaggagaatcgcttgaaccagggagacggaggtttcagtgaaccgagatcgtgccattgcactccagcctgggcaacaagagcacgactcaaaaaaaaaaagaacatggtatgtctttacatttgttcaagtcttcattcaagagtattttaaaaaatgtttttgttgtttgattttttatttctttttaagtttactcctaggagttttatttttcttgttgctttaccacacagcttatgattttacttcccttgtagatataccttcagggaaaggatatgattaattatgtagagtactttagtttgagtgtcagcttgttactgtaaatcacagattcacattctggtcttttatgtcattccatgagagcagttattatgacccacaataagagatgactccaggaatcaggttttggagctgaaagccagatcctggatcttggaaagttcacctttatatatataagtgtgtgttgctcgatggattggcctcttggtatacagccagatgacttctccgtgcaaaactacaatcatgtttatgccttgtgtttaaaaaatcagtagttcactcagtaaactatttcaattgagagcctttaagaaagcctattatgcatggtacttatatatgaatggcagtctccttagctgttgctgatgtttctgcatctatttatgagtttaagggcccaatctatacactaaaaatatgctttggaaaattactaagtaactatctttggtcaaatctttaatgcaagttttaaattcttatatattacagaatttcacaaacttgtttggacagccactagtctgcttgctttctcctacagcatatccaaaagctttacaaggtatgtaccctcattgcctggtatagccataggttgcaaataaacactatctatattatgaatagtactgatctttgttttttcctcccataatgatcgcgtgtggatttatggtgtttaatatggcaggtgtcgctctgaaatatacccagaagccttgccaacaaccaggatcccttaatgtgctaccgttaggccttgaaataattcatccctgagaaagaagtggttttgttccttgctgatggggaactcatgatttgtaaattttaaaatttgttttataggtgtttgttttgatttgctggtcatatccatatagcatggttttcctatacctttgcaggcatgttttaaaagatccaaggcatcttttaagactttaagattgctggtctaggaaacttctcagtctatgccacagagttaggataacctaactggcacaacttaaagtgtttcttttattcacatttttaccttgttgtgatttaaaaataaaagaacctcttctaagtctgccagagagacaggttagtgttttggccatttcttcaatggctgagaatcaaaagactttttgtccttaataatttgtctttaattagtgacacataaaatctaattctaactcccagtcatttagtaggtaaaatactaaacaaccttaacactgttttagcagtacttgtcactgtttcactatctccctaactgtgaatagtgctgatgtctctctgtgggagatggcattttactgctacttcccagccagaagtcctgtctgctgacatagtttgacacaggaagtgatggtcagcatttgaatgcctgagagaagctggaggctttcaccgttgttttaaggtaagttctgctgtttaacagggaaaaacatgtagaaatattaacttcatgtatccaaaagtaaaattactaagggatagaacttaccttcaaacaacggtaaaattctcctgctttgaagattttgttatcctgtttcttatcatttctggaggaatgtaatctctttcagttactgagcagtactttttgctatcaatctgtcctatcattatgtagttttatttaaatttacatggtcaaataggttaataccaagattattcggtctgaaagacttcattgtatagaggagaaaaacagactttggaggcaaactgactgaatttgaatcccgactcagccacttacttgctgtgtgaccttgggaaattattcagccattctgtgcctcagtttcttcatctatcaaatggaaataataatagtatctacctcatagaataatgctgggtatgtagtaactactcaatatgtgctgtcattattattattatgcttagttgtaatacatgtccttcacacattttatccggtttcctatcttcatgctacaaagcttagacctctaacaccttaaattaattgttcarttacaaaagcagattcaaaattcttctgtgagaaatgttttggatttatccataggcataattgctactcacctctgcaaaaggggagagccttccatgtgggtgcaaaactagctgatcagtaagcacttctgagatctaaagcctatagttttctcattagccaagagttacttcatttattcaatttttttttttttttttttgagatggggtctcactctgtcactcaggctggagtacagttgtgtgatcatagctcacttcagcctctacctcctgggctcaggtgatcctcccacttcagcctctcaagtagctgggaccacaggtatacactaccacacccagctaatttttgtattttttttttgtagggactgggtctcaccatgttgcctaggctggtctcaaactcctgggctcaagagatctgcctgccttggcctcccaaagtgctattcaacatttattatcaggtactgtgctgggcactggagatagcactatgacctgacaagcacagttacattcttcacagagccaaatgtcttgtggcagatagacagagcctgatgggcggttattataagtgattcacaagaggatgcctgcaaatggacgaggaactcctgactagcagcacaatgaagacgagggaaggggatgagataatgtctaacgtggacgttaagaacatggagaactagatgggggtgggaaatgaccgagcaagagtgttccagctgagaatttgcatgtgctgtggccatgagataagacagcttagggagcatgtagagaaatttattttattgtatttttttgagatggagtcttgcactgtcgcccaggctagatgcagtggcgcagtctcagctcactacaacctctgcctcccaagttcaagcgattctccttgcctcagcgtcccgagaagctgggattacaggcgctcgccaccactcccagctaatttttttgtatttttatgagagactaaaaatgttggccaggctggtctcaaactcctgacctcgtgatctgcccgcctccgcctccaaaagtgctgggattacaggcgtgagccaccgtgcctggcctaattttgtattttcactagagacagggttttgccatgttggccaggctggccttgaacacttgacctcaagtgatccacccaccttggcctcccaaagtgctgggattacaggcgtgagccaccacacctggccaagcacatagagaaattagtcattccttctagctaaagggtagagtttgagattgtgtgattgaattgtgaaagaatttctaagatttgttaagtaatttaagtggaagacaatggggtacaggttgagcattcttagtcctaaaatctgaaatgctccaaaattcaaaagtttgagtatcaacacgatactgaaagtgaaaaattccacatatcagtacttagcacaaggtttgtttcatgtacaaaattatttaaaatattatgtaaagttacctttaggttatgtgtatacggtacatatgaaacattaataaacttcgtgtttagacttgggacctgtcccsaggacatctcattatgtatatgcaaatattgcaaatcccaaaaaacccaaaatccaaacacttgtggccccaagcattttggataagggatactcaacttgtaccatcaaaagatttaaacaggagagtagcatgaaagagcattcagttaatgtcctagagaatgaacttgggaggggcatggatgaaaatagggagatggctggagatagcacaatgactagtagccagctgcaaagatactaagcccatagaaccatagaaccaacaggactttgtgatggactaggtgtggggagggaaggcaggaatagacttccaggtttctggctgagatgctggtagaaatgataatacctgatgagaagcatatttgtagagaacaaaaggggaaataatttgctttgagttgttgacatgttgagtttgaggtgcctttgagaattaggttgaatagagtagcctagagcagcagtacttaaaagaagtaagagtgtgagtcattaaattttctattacctatatcaaaaacagtaaaaagaaacaggtgaaattagtgttaacaatgacattttgtactaaagctttgaaatcatctagtcacattttactcatctagtcacatttttagtgtccagtattttactcatctagtcacgtttttagtgtccagtatctaccgcaagacagagcagtgccagacctaaggaattcaatttaggctgctgatagagaattagaaatttgtaggcatataaatggtaactaaaatcatgggagtgagagcagtcagcaatgtatggggccaaagaaagaaactactcatatttaagagataggaagggaaagagcagctcatagagagcaactcagaagagaatgaaaaagactggcgtttgtagcactcatcagagaattctatcaagataacccataatccaacacttgccatatttggatgaaatttgttaattgagagcaaaaaatagtaagaaatatcattttccatttctcttaagttttctaggctctttctgaagtttgttcagcagaaagcaacatagcaaagtttttgtagtttcgtgaagaatctgctttgatgaattatgatttaatgagatagctttaattttatatattatcagtatattaaaatgttcctcatatgtatctcttatcttttgcaaaactattgtctatatatataacatgtttgttattacagatcaatctcagcgaggtagcctcttcactctctttttgaacaatcctctaatggccttcctatttgtctctggattgtcaagcatgcgcagaggcctatgggaaaagtgtcaagaatatcttcgaaaaatcaaccgtgatattgcccagctactgactcattcacgttcaataggtaccctcctaatctaactgcacrtttaacagaatgtactataatggcttaaaatggttacttattttaaattgtttgaatttttaaaggtatgtgtcccaggcaggaaagttgagaacgctttcctgaagtttccttcccctttgaaacataatttccatttaagcatctttttactgtcacttttctcctctttgcagatcaggcatttctccagttttttggagatgaatttcttcgcttgctcctcacaagatttatcttttgttcagccaccatgaggatgcacaagatttttcgggtaggcaaagaacattattaaagacgaattttatcattttaggtatttaagaaccatgtattatattttacctgtataaaataaggttataataaaataatattattttggataaattcaaaataatatttacaaatgtaccgtcacactggtctgctaagtaaaaaaatacatttgaatacgtaaagtataaagattaacaatattaaggcacatttgagtacctatcgtttgtttaaaagtagaacattttctggctggccgtggtggctcccgcctgtaatctcagcactttgggaggtcgaagctggtggaacacttgaggtcatgagttggagaccagcctggccaacatgctgaaactccttctctactaaaaataaaaaaattagccaggtatggtggcacgcgcctgtaatcccagctactctggaggctgaggcaggagaattgcttgaacccaggaggcggaggttgtggtgagcagagattgcatcactgcactccagcctggacgacaagaacgaaactccaactcaaaaaattaaaaaaaataaaagtagaacattttcaatacatccctgatcctatctccctctcaaatgaaacttacatcctgaattttatttatttatttatttatttagagatggagtttcactcatgttgcccaggctggagtgcaatgactcgatctcagctcactgcaacctctgcctcctgggttcaagtgattctcctggctcagactcccaagtagtagctgggattataggcgcccaccaccacacctggctaattttttgtatttttagtagatacagggtttcaccatattggccaggctggtctcgatctcctgacctcaggtgatccacccgccttggccttccaaagcgctgggattattggcatgagccactgcacccggccctgaaattttttttttaatcattcatttttctttgtagttttgcagcatgtatttctattcctacacaacatatttatgaatccatattgtatgtattctgcagcttccttttttccagttattcctgagattgagccatgttgattgactatagctttcactcattcattttgtttgactgtgcaacactaggcagtgtttgactatatattgcaaatcacttattcttctgataatggacatttgggttgcttccaagtttttattattatataaatgatactggccaggcgcagtggctcacacctgtaatcccagcactttgggaggcagaggcaggcagatcacaagctcaggagttcaagaccaggctggccaacatgatgaaatcctgtctctactaaaaatacaaaaattagccagacatggtggcatgcacctgtaatcccagctactcgggaggctgaggaaggagaattgcctgaacccaggaggcggaggttgcagtgagcagagatcatgccgctgcactccagcctgkgcaacagagcaatactcagtcttggaaaaaaaaaaatgatgttactgtgaaattcttgtatcagtttcctggtacacatatgtaagattttctctgaggaatatacctaatagtagaattgcaagatcagaggatataagcatatttaattttactaggtaatgccagactgtgttccaaagcggttgtatcagtttacacttataccagcaggatataagagttgctatttctgtaatccttcctttccaacacttgttgcaatcatactttatagcttttgtgaatctgctgaatgtaaagtggtaggacattgtggttttaatttttatttcgaggattactgttaaggttgagcaacttctcatatgtgttctgtttttctctttgtaaagaatgtgttcaagtcttttgcttgacttgatagtccagttttctagctgttgcttttttgtgtatggatgtacctatacaacacttcattgaggttttaaatattttagccattatatttttcacttctgtaaggaaaatttttttttcaaatatgcctgaacagttaaaaaaatattttgcagcttttggtttcagaatattatttctttctgttttattatgataattttgaaatgtaaaagaactgtgcaatgggccaggcgcagtggctcacacctgtaatctcagcactttgggaggccgagacaggagcatcacttcaggctaggaatttgagaccagcctgggtaacatagtgagacctcatttctacaaagaaatttttaaaattagccaggagtagtgatgtgtgcctatagtcccagctcttcaggaggctaaggtgggagaattgcttgagcccaggggtttgaggctgcagtgagctctgattgtaccactgcatgggccaactgtgcagttccacttaagacacagcctttttttttttttttccaaaaaataaattggaaaaattttggagatttcctacagtttggaaaacagatgaactacatagcctaggaatattgaaaacattgctcacctgggccctgcggccagcagaattggccccgctctatggctgctggggcctgcgcactggaatcgccgtggcctgcgcaccccaccatgccagtttgaacctccatggcctcaaccagattcggaatgtcaaaaagcagagtgtctatttgatgaatttgaggaaatcgggaactttgggccacccaggctctgtagatgagaccacctatgaaagactagcggaggaatcactggactctttagcagagttttttgaagaccttgcagacaagccatacacgtttgagkactatgatgtttcctttgggagtgktgtcttaactggtaaactgggtagagatctagcaacctacgtgatcaacaagcagacaccaaacaagcaaatctggttatcttctccatccagtggactcaagcgttatgactggactgagaaaaactgggtgtactcccacgattgcgtgtccctccatgatgtgctcgctgcagagctcactaaagccttaaaaaccaaactggrcttgtcttccttggcctattctggagaagacgcttgatgcccagcccggttttaaggatattaaaagctgtcaggccaagaccccagcttcattatgcagctgaggtctgtttttttgtttttcgttttttgtttttcattcctgcttttgaggaacagctctgtggaaagaacgtgttgcctcctaccttgcccacaagttttgatttttaatttctacagaagatttttttggattaattgtctgatttcctccctcatatgatatcctttatcttttataatgtcttatccctatacctgaatataacaacctttaaaaaagcaaaagaataagaaggaaaaattccagcaggagaaatgaattgtcttcactcttcattctttgaaggacttactgcaagaagtacatgaagagcaactggttaacctgctcactgttctgtctcaaaatgagacacattaacgggtaggctacaatgttcctggrcttctttcaaagtggaagcacttctgagctctttagcattgaagtgtcaaaagcaattcacatgggaagacaatttcttatatgtgctttgtgactgccagggtgtggcctgcactgggttgtcctgggagacctagtgctgtttcttccacatattcacgtgtgtgtgtgtgtgtgtatttttttattattttttcattttaagggttagtatggaatcagctgctacaagaatgcaaaaaacttccaatgacaagaaaggaggaaaaaaaagccattttcatgagctgagtgatgtagcataataaacaaaatcatggagctgaggaggtgctttgtaaacgtgaaggggcataaaaaggaaagagatacttgtgtcaataaagagagcctggtcctagacgtagttcagccacaaagtagttgtgcctttgtggacaagtttcccaaactccctgagcctctgctttcccatctgttaaatgaggggatagaatatggttgatttccagcattcagtggtcctgtcaagcagcctaacaggctagctctaattcccattgggtagatgaggggatgacaaagaacaatttgtgagctatataggaaacattgttattggtgttgccctatcaggatttcagttgaattcatgttaaaattacagccgtcctttattgtacacttattgggttaagcctattataccatattacctcattttaatttttactgacctgcactttatacatgaagcaacaaggctccaggacattaaaactcacacaaagttatgctcatgttatattattttcttacttaaagaaggatttattagtgacaagtttgtattaatatgtagcaaaggcttttccaatgggtgaataaaaacacattccattatagtaaaaaaaaaaaaaaaaagtcaagctgggagaagtggcatatacctatagtcccagctactcaggaggctgaggcaggaggactgcttgaagccaggaattggagatcagcctgggcaacataggaagatcctatctcttagaaaaaaaaaactcttaataatgaaacagtataaacagaagctaagtaaaatattttctttctcctgaaataaaattattttttgagtctgatggaagtgtttaagtgcagtaggtcagtgccagtgagaaaaaaaataaaatcatacaaaaaaagaaatattgaataaattaagaaaaaggtatatcatraatacataaaatatatgtagacactagtctattttatcatttactactataagatatatacaaatctattatgaatgattaaaatttatgcacacacttacagaccatatatggtaccattcacagtccagagaagtgtaaacaaaagtaatgatgcaatattaaatcataactgtccttgtgatagtttgctgagaatgatggtttccagcttcatccatgtccctacaaaggacatgaactcatcattttttatggaaggacaaaaaaccaaacaccgcatgttctcactcataggtgggaattgaacaatgagagcacatggacacaggaaggggaacatcacacaccggggcctgttgtggggtcgggggaggggggagggatagcattaggagatatacctaatgtaaatgacaagttaatgggtgcagcacaccaacatggcacatgtatacatatgtaacaaacctgcacgtgtgcacatgtaccctagaacttaaagtataattttaaaaaatcataactgcataaaatcactgtagtgcctactgtactactgtaataatttggtagccacatcctgttgctctggcagtaagctcaagtgttgcaagtactgcttagaatgcctgtcatttccgtgagcagtttgtctctccagtaaattgtgtattgtaataaaaaatgatctctagyggttctcacatattttttattgtgtttagtgcagtactgtagtaaaccttgcataacaccatgggatccatatgaagtgatgcttcaagtgctcccaagaagcaatgaaaagtcatgacattacaagaaaaagttgaattgcttgatatgtaccatagatcaaggtttgccattgtggttgcctgccatttcaagataaattaatccagtaaggagtgttgtaaaaaaagaaaagaaaatttgtgaagccatcactgtagctacgttagcaggcatgaaaaccttacactttttgtgaaatacctttttatctcataatgaaaatgtagcgtttatgtaggtgcaaggttgctataagacatacttacaggccgggcacagtagctcacgcctgtaatcccagcactttgggaggccacagagggtggatcaccttaggtcaagatttcaagaccagcctgaccaatatggtgaaaccctcgtctctactaaaaatataaaaattagctgggcgtcgtggcgtgagcctgtagtctcagctactcgggaggctgagacaggagaactgcttgaaaccagaaggcggaggttgcagtgagctgagatcacaccactggactccagcctgggcgacagagcaagactccattcccccccgacatacacacaaaaaaaagacatatattatgatttgagaaaaagcaaactcattatataacaaagcaaaaggaaagtgaaggatctacagctagagaattaaattctggcaagaaagggtttgataattttcgaaagagctttggctttaaaaatgttaagataacacgagaagcagcttctgccaaccaagaggcagcagacaagttcccagaaagtaccttttctggaaaaaaaaaaaaaacctgccacaaaagacatttattagtaaggaagagaagtgaacaccaggatttaaacaggaagggatagacaactctgttattttgtgcaaatgcacttgggtttatgatcaggagagtctttatctataaagctgctaatgcaccttgacagaaaagataaacaccagctgccagtacaacaagaaggtctggacaacaggaactttcttccagattagtttcgttgatgctgtgtccttgaaatcaggaagtaccttgccagtaagggactaccttttaaagtttttttgatatttggcaatgccgtggctgtccagaaccccattaattctatactgaaggtatcaaagtggcctacttgccccagaacacaatgtcagcctctagatggggggtcctaaggacctttaaggttcattacacagagtatgtattatcaaaactatggaagagaacccccaatggagagaacatcatgaaagcctgaaaggattccaccattggaaatgccatcattattacagaaaaaggcttgaaagccatcaagcctggaatcattcctgctggagaaaactgtgtctagatgttgtgcatgacttcagaggatttgtgacaatcaaggaaatcatgaaagagattgtggatgtggcaaaaagggtggggagtgaagggtttcgagatacagatcttggagaaattcaagagctaatagacaccacaccagaagaattaacagaagatgacgtggggtggacatgaatgtttctgaaccagtgccaggaagcagacatagaagaagcagtggcagaaaacaaatggacattagacaacccagcagaagggtttagattattcaggattgggcttttgacttctatgagatggatgcttctatgataatggacactgaaatgaaagcaaatagtggaaggattggtgccatatagaaacattttagagaaatgaaaaagcagaaatgtcagacacaaattatgacatatttgcataaaattatacccagttgcctgtctctcctgcctccccttccatctccttcacctctcctctctctgccacccctgagacagcaagaccaacccctcctcctcctccacagcctactcaatgtgaaggcaatgaggatgaagacctttatgataatccacttccatttaatgaatagtaaatatatttctcttccttatgattttctttttcctttttttttttttttttttttttttgagacagattctcactctgttgcccaggttggaaggctggagcacagtggcgcgatctcagctcactgcaacctgcacctccggggttcaagagattattctgcctcagcatcctgagtagctgggattacaggcatgttccaccatgcccgcctaatttttgtatttttagtagaggtgggatttcgccatgttggccaacctggtctcgaactcctggcctcaagtgatcctcctgcctcagcctcctaaagtgctaggattacaggtgtgagccaccgtgctcagccctggccaattttcttagtaacattttcttttctcagcccggcgctgtggctcacgcctgtaatcccagcactttgggaggccaaggtgggcagatcatgaggtcaggagttcaagaccagcctggccaacatggtgaaaccccgtctctactaaaaatacaaaaattagccgagcatggtgtgagcacctgtaatcccagctgctcgggaggctgagacaggagaatcgcttgaacctgggaggcagaggttgcagtgagccaagattgcaccattgtactccagcctgggtaacaaaagcaaaactccgtctcgggggggaaaaaattcttttctctagctaactgtattgtaagaatacagtatataggctgggtgtggtggctcacgcctgtaatcccagcactatgggaggctgaggagggtacatcacctgaggtcaggagttcaagaccagcctggccaacatggtgaaaccccatctctactaaaaatacaaaaattagccatctgtggtggcatgcacctgtaatcccggctactcaggaggctgagacacgagaatcacttgaacctgggaggtggaggttgcagtgagccaagatcgcgcgactgcactccagcctgggtgacagagcaagactgtctcaaaaaaaaaaaagaaaaagaaagaaaaagaaaaaacaatatataatacatataatatacaaagtatttgttaattgactgtttatgttatctgtaaggtttctagttactggtaggctataagttgaattgcttgatatgtaccatagatcaaggtttgccattgtggttgcrtgccattttaagataattaatccagtaaggagtgttgtaaaaaaagaaaagaaaatctgtgaagccatcactgtagctacgttagcagccatgaaaaccttacactttttgtgaaatacctttttatctcataatgaaaatgtagcatttatgtaggtgcaaggttgctataagacatacttacagaccgggcacagtagctcacacctgtaatcccagcactttggcaggccacagcgggttggtcaccttaggtcaagaattcaagaccagcctgaccaatatggtgaaactctcgtctctactaaaaatacaaaaattagctgggcgtcgtggcgtgagcctgtagtctcagctactcgggaggctgagacaggagaactgcttgaacccagaaggtsgaggttgcagtgagctgagatcacaccactgcactccagcctgggcgacagagcaagactccatccccccccgcaaaaaaaaaaaaaaaaaaaagacatatattatgatttgagaaaaagcaaactcattatataacaaagcaaaaggaaagtgaaggatctacagctagagaattaaattctggcaaaaaaagggtttgataattttcaaaagagctttggctttaaaaatgttaacacgagaagcagcttctgccaaccaagaggcagcagacaagttcccaggtgccactgaggggaaaggatacctgcctgaacaggtttttagtgcagaagaaagtaccttttctggaaaaaaaaaaaaaaaaactgccacaaaggacatttattagttaaatttcaggtagttaaaagttatacatggatttttcagggagttgaaagttatacwtggatttttaactgtgttagggagggggctcagcatccctaacccctgcattgttcaggggtcagctatatttgagttctgacatatttgtccatttatggattcgtcttaccattcatcagtagatcttttttttttttttttgagatggagtcttgctctgttgcctaggctggagtacaatggcgtgatcactgctcactgcaacttctgcctcctgggttcaagcaattctcctgcctcagcctcccgagtagctgggattacaggtgtgtgccaccacgcccagctaatttttgtatttttagtagagatggagtttcaccatattggccaggctggtctcgaactcctggcctcaggtgatccaaccgcctcagcctcccaaagttctaggattacagggatgagccaccacgcctgacaccatcttattttttaatgcattttgaagtaaattgcggacgtcacccacaaacacttcatcatgcatatatgtaatatgtttactttttttttttttaatgagatgagatcttcctatgttgcctaggctgatcttgaacttctggattcaagctatcctcctgcctcagcatcaaacatagctggaactataggcacattgccactgcccaactactaatttttttttttttttttttaatttgagacagagtctctgtctgtcatgcagtttggagtacagggatgcaattgtagcttactgcagcctcagtctcctgggctcaagcagtcctcctgcttctagcctcctgaatagctgggaccacctgagtacggtgcaccaacatgcccagctaatttttaaatttttttgtagagatggggttttgctgcattgcccagggtggcctcaaacttctggcctcaagcaatcctcccaccttggcctcccaaagtggggtaataggcatgagccactgtgacccacctactaattcttttttatgtaaagtttacatacagtgaaatgcacaaaattaaagtttaccattaagtgagttttgaggaaatacatctgtgtaacctaaacctttgtcaatttgtacaagatagcatcattccagattgttccttctatcctcctttttagtcagtccagtacccattaccccagaggctgtcactcttgtgattgttttcactcgagattacttgcatctgttcgtgaacttgactcacacagtatggactcttgtgtaaaccttctgtgactaagcattgcattgtgcttgagattcattccagttgtttcagatatcagtagctcattcctttttgttactgagtagtattccattgtctgagcataccacagttcaggcattctcctcctgatgaatacatggcagttgtacagtgttggctattacgggccagggcatggtggctcctgtctgtaatctgaatacttcaggaggccaaagctggggcgtcgcttgagccccagcagttccatgttacagtgaattatgatcacgccactgcattccagcctgggtgagagagggagttcctgtctttaaataaataaatagttggctaatagaaataaaaccgctttttattataaaaaggcttgtacaagcctttgcacagacatttgttttgaatttttttggtcatagtattggtatgtgtttagttttataagaaattgcagtgattcctcagggatctagaactagaaataccgtttgaccyagcaatcccattactgggtatatacccaaaggattataaatcatgctgctataaagacacatgcacatatatgtttattgcggcactattcacagtagcaaagacttggaaccaacccaaatgtccatcaatgatagactggattaagcaaatgtggcacatatacaccatggaatactatgcatccataaaaaaggatgagttcatgtcctttgtggggacattgatgaaggtggaaaccatcattctcagcaaactgtcgcaaggacaaaaaaccaaacaccacatcttctcactcataggtgggaactgaacaatgagaacacttggacacaggaaggggaacatcacacatcggggcctattgtggggtgggggggatgggggagggatagcgttaggagatatacctaatgtaaatgacgagttaatgggtgcagcacaccaacatggcacatgtgtacatatgtaacaaacctgcatggcacatgtaccctagaacttaaagtattttatatatatatatatgtgtgtatatatatgtgtgtatatatatatatgtgtatatatatgtgtgtgtgtatatatatatatatatatatgaaattgctaggccttatctcaaagtggttgtaccatagttacattcccaccagtagcttttgaaggttgcttttcattcttgccaacattgttgtcagacttttaaatctgaccattctgatggatatgtaggggtatttaaaatttcatcaaaattcttttttttttttcatttgaaatgcttttttttttaaattttattattattatactttaagttttagggtacatgtgcacaacatgcaggtttgttacatatgtatacatgtgccatgttggtgtgctgcacccattaactcgtcatttagcattaggtatatctcctaatgctatccctcccattgaacaatgagaacacatggacacaggaaggggaacaaaattcttaaaaaataaaatttcatcaaaattaaaagtttagttcaatgcaaattgaagctacgatgaaaaatctgagttttttcttctctgatttgtgtttttgtgtattatcccagaaatctttacttaaagttacagagattttgtttttttgtttgttcttttttttttttttttgagactgagtctcactctcacccaggctggagtgcagtggcacaatcttggctcactgcaacctctgcctcccggattcaagcaattctccttcctcagcctcccgagtagctggtattacaggtgcccaccaccacacccagctaatttttttgtttttagtagagaggggttttcactatgttggccaggctgatctcgaattcctgacctcaagtgatccctctgccttcacctcccaaagtgctgggattacaggcgtgagccaccacgcctggccttctcctattttcttctaggaattctatagtttcagcttttacatgtaggtctatggtttattttgagttaatttttgtttaaagtgtgagataaaggttaaagttttttaatatgcatatgcagttgtcctagtaccatatgttgaaaagatttttcttttcccattgagttactttggtaactttgttgaaaatcaattaagcatatatgtataaggatatttctgaactctaaattctcttccattgacctacaggatttgtctcaaatacactactgcctttactattgtagctttaaaaaagtcttaaaatctgatagggagagtccccttccccaaaagatttttaggtattttggttgttttagttcctttgtacgtctatataaattttagcatccatgtcacattttgcttggaattgtattaaaaatctatatataattcacctgtggggaattactattttaataatattgaaccttccagtcaataataatggtatatatcctcatttacttatatgtttagtttctttcaccaggattttatagtttttatcatacaggtcttgcatgtgtttcataatttattccaaaatattttatgttccagtatgctttaaaaattgaattatttggctggacatggtggctcatacctgtaatcccagcactttgggaggccaaggtgggcaggtcacctgaggtcaggagttaaagaccagcctggccaacaaggcaaaaccatatctctactaaaaatacaaaaattagctgtgtgtggtggcgggtgcctgtaatcccagctacttgggaggctgaggcagggagaatcacttgatcccgggaggcggaggttgtggtgagccgaggtcgtgccattgcactccggcctgggcaacagagtgagactccgtctttttaaaaaaaaaaaaaaaattgtattatttggccaggcgcggtacctcacacctctaatctcagcactttgggaggcagaggcgggcggatcacaaggtcaggagttggagaccagcctggccaaggtggtgaaacctcatctttactaaaaatacaaaaaaaaaaaaaattagccgggtgtggtggcgtatgcctgtagtcccagctacttgggaggctgaggcaagagaatcacttgaacctgggaggcggaggttgcaatgagccgagattgcaccactgcactccagcctgggcaacagagtgagactccatctcaaaaaaaaaaaattgaattatttttatttcatttttcagttgcttgttgctaatacatagaaatgcacttttaaaacactggccttgtggctgggtatgctggctcactcctttaatgccagcactttgggaagctgaggcaggcagatcacttgatcccaggagttggagaccagctgggyaacatggtgaaaccctgtctctacaaaaaatacaaaaaattacttgggctgtggtggcacatgcccatagccccagttacctgggaggccgaggtaacaggatcacttgagcctgggaggtcaaggctaccctgagtcatgatcatgccactgctctccatcctgggtgaaagaatgagaaaccctttcttaaaaaaaaaaaaaaaaaatacagttgaccttgtgtcctgcagtcttgctaaattttgttagttcttttagcttttttacatgttccttaaaattttctatatacaagatcatgtcatccatccttaaacaaaaaacagctttacttctttttttccaatctatatgccttttcttgttattagtgctttatatcagggctaggtcttctagtaaaatgttgaataaaagtagtgaaaatggacatccttgccttcttcctgattttaggggaaagatgttagtctttaaccataaattatgatgtaaattgttggttattcatagataccctttctcagattgactgagctcccttccattcttaatttactaagagtttgtatcaggaatgggtatggatgattcgcaaaacttttttctgcatctactgatctaatatattctgttaatggagtgaataacattaattgatcttttaatgttaaatcagccaggcgcggtggctcacgcctgtaatcccagcactttgggaggtcgaggtgggcagatcacctgaggttgggagttcgagaccaacctgaccaacatggagaaaccctgtctctactaaaaatacaaaaattagccaggcgtggtggcgcwtgcctgtaatcccagctactagggtggctgaggcaggaaaatctcttgaacccagcaggcggaagttgtggtgagccaagattgtgccattgcactccagcctgggcaacaagagcgaaactccatctcaaaaaataaaaaaaaaagttaaatcaaccttgcatagctattaaacccattttgtggtcatatattgtcctttttgcattgctgggttgaatttgctaatatttcattatggatttttatatctgttttatgaatgattttggtttttatttttctcgtaatgtcttcatgtggttttgttatcaggatagcgctgacctcataaattgagttgatatgttcttcattctcttctatttcttaaaaagtttgtttagattagaattatttcttccttgaagccacctgggcctggaattttcttttttagatttaaaattatgaatccactttcaaagggctgtttatgcattctgttacttcttagtcaattttgataatttgtgccttgaaaggcatttatctaatttgttggcataatattgtttataattttccattgtccttttattcctgtaggcactgtagtgatctttcatatcccttattagtaatttgttttttctttctttttctgtcttggtaaacttccattaactttcgtttttttcactaccgtttgtttctttttttttcacttatgtatgtatttatttatttaaaaaaattttttttgagacagagtctcactctgttgcccagtcaggagggcagtggcgtgctctcagctcactgcaacctctgcctcccgggttcaagcaattctcatgcctcagcctcccaagtagctgggattacaggcacccgccaccatgcccagctaatttttgtattttttggtagaaactaaaaaacgaataaggccatcacacccggccttatttattttaaatttttgagacagtgtcttgctatgttgtcgaggctggcctggaactcctgggctcaagagatcctcccatctccatcccctgagtagctgtttctcttttctgtttcatttatttccattcatactttattattctttcctttttactttaatatatattatagtgttttaagcttagatctgaaaccttctcttctaacacaagcatttatctttaatttttttttttttttttttagacggagtctcgctctgtcgcctaggctggagtgcagtggcgcgatcttggctcactgcaacctccgcctcttgggctcaagcaattctcctgcctcaccctctcaagtagctgggtactacagatgtgcaccaccacacccagctaattttttgtatttttagtagagatgaggtttcaccatgttggccaggctggtcttaaattcctgacctcagataatccgcctgctttggcctcccagtgtgctgggattacaagggtgagccaccacacccggccaccttttatttttgaccacatattatatgacttatttatatggaatgtccagaataagcaaattttttgataccagaagcacatgcgtggttatccagggctgagggaggggactggggcgaatgggggagggatctgctagagaataaagagcttcttttgggggtgacgaaatgctctaaaattggttgtggtgatagttaaacaactttctggatatattaaatgccactgaattgtatactttaaatgggtgaattgtatggtatgttaattgtatcttaataaaaccgttactaaaaaaatacaaggtgcctctcactagctgtgtgacattgaagagtgatctcacctttcttagccttagtttacttatctgtaaaatgataacagaagctacctcatgagattgctgtgatgtttcagtgggaggattgtgtaactattgagcatagaagtacttaccttttaagcattgctttaactgtatagtttcagttttaaaatttattcagtttgttttttaacccaagcatgtgaattatcttggcagtggttttatctgcacttgaaaagaattcagtgtattctgctattactagatggaatgatataaaaatgtcagtttgttccatttgatattaaactaaattgaagagtgttctttgtatcttctgtatttttgttgattttctgtctgctttttcaatttctgaaacagtagtatttaaacctctaattagggctgggtgcagtggctcacgcctgtaatcccagcacttggggaggcccgaggcgtgtagattggttgagctcaggagttcaagaccaacatggcaagaccctgtctctacaaaaaataccaaaattagctgcgcatggttgtgcacacctgtggtgccagcttcttgggagactgaggtgggaggattgcttgagctcattgcaaggctgcagtaagccagcctgggcaacacagtgagattttatctcaaaaaaaaaaatttatttttgtaatgtgtgagtgagtcctataggtagagagaagttaacatttgtatgtatgaactgttgcatgaaatgtacagaaaagtagcaacttcttcaggaaattttaaatgtatggcaggattatagtttatagaacttaccaaatgaagaagaatttctaggccgggcacggtggctcacgcctgtaatcccaacactttgggaggctgaggcgggcagatcacctgagttcaggagttcgagaccaggctggccaacatggtgaaacacctgggctggagtgcaatggcgtgatctcaactcactgcaacctccgcctcccgggttcaagcagttctcctgcctcagcctcctgaatagctgagattacaggtgcccaccaccatgcccggctaatttttgtattttagtagagatggggtttcagcatgttggccaggctggtctcaaactcctgacctcatgatctgcccgcttcggcctcccaaagtgctgggattacaggcgtgagccatggtgcccggctgccccagcctcattttaatttccaaagcaatatctttttatttatttaacatatacttgttgaaattctatatgtgttaggattttccccccagtagcatgaattatatggtttccacgtgatacagagcatagtgtctagcaacaataggcctcagtaaacatttgtggaataactcactaaatgaatatattacattgattcatctgaaactgtcatttttagaggtcaaaatggttaaatatcagcaattcaatattcaacaaatatattaataagaatcattccagtataaaagtgaaaatacatattactccttgacactgttatcaatgtgtataattttctttcattagactacaaaacttgacttttctcttctttgcctaccaggaaacacgaaattatccagaatcatatccacaactgccaagggatgaaacagtggagaatcctcatctccagaagcacattttggaattagcatccattctggatgttcgaaacgtgttctttgagaataccattgatgactattaaaacaaaaaccctgttgtcgaaacaagttttcattttccacaaattttaaatggtgcagttttctaacgtgataagacacatagtggtgttacttagtttttattttttaatttagggccaccattttaaaaacaaacaaaaaaatgttcacacttttagggtaactgttttaaaatgcaacctttcaggtcttttaaaatcttaaccttggaatttttattttttgattttgagggatggatatttacctccaacttctaatcctacactcaaatagtcactattctcaccctgagaagagtaaatcatttatttttgtataatgaggtaaatccaactcttatacttggacctaagttaaatgtctggatttggaaatatgtaatggttcataatgatgaagctagccaccatggactactgaaaatcaagaacagagtccctccataatatattttttctcattccaacttagctggtagaaaaatgtttgatcctttgaaacatgatcaagccagttttttgaaatcatttaatttctttcaatactgtcataatttcagaaattggattgaattgcatctgaaagctacatcttgattgaggacttgaggtggtaatattacttggaatgtatgagtattatgagatttatttgcatattttctttgtagtctgtgaatgctggaaatgaaaaaggaaacaactttgaaatattttagtcaaaaaaccatgtcattggtttcataatacaatgtctccaataggaattctatttaaactcttggtttatgagatcacatttaaagactggattgatgtctgtgacataaagttttaattttttgcctcattcaaatttatgagacttcaaagtcatagatgttttaaattttggtaaggggtaactgggtgttatgaaacctaaaatgtaagttgattttgcattggtaatttggaaataagatttattaacattccctgtatttagtattttatattcatgcacaaaatttttattatcttaaataggactcagtgtatattataaagatttttcttttttgtgttttccttccctgtcattccctttataatttcacagtcacttgctatgaagtcctccctcctttttgattatgcagcattcaatttcagaaatctatgaatgagaaggccttatacctaattttctgtacaggatcacatctggcagtcccaggagaagtgagctgattgcttttgatatctctttcccatggccctaggtaaattatactctaaatttatttattttttttgaaacagagtcttgcttttgttgcccaggttggagtgcagtggggctatctcggctcactgcaacctccgcctcccaggttcaagcaattttcctgcctcagcctcccgagtagctgggattacaggtgcccgccaccatgcctggctaatttttgtatttttagtagagacggggtttcaccatgttggtcaggctggtctcaaactcctgaccttgtgatctgcctgcctcagcctcccaaagtgctgggattacaggcgtgagccaccgcacctggctattatttttaacttggttttcatttctggcatagagactaatttgggtctaagttattcccattcctgctttgatttgctgatttttcaaacctgaagtccaaagttactgtttttggggtttggggacttggggagtattttacttttttttttttttttttttaagagacagagtcttgctttgttgcccaggttggggtgcagcggtacattcatggctcactgcagcctcaaattcctggattcaggcaatcttctcacctcagcctcccaagtagctgggactacaggcatgcgccaccatgcctggctaattttctttattttttaattttttgtagagacatggtctcactttgttgagcaggctggcctcaaactcctgggctcaagtgatcctcctgcctcaacctcccaaagtgctaggattacaggtgtgagccactgtacctggcctgtttactttttaaaaatttttttgtttgttctttcaaacagtatttcagaaagcttgggaaaagttaccctggaaagatttcctttgctagtgggttttcattttcaggtaaagactgctttccttttttttcagtatcttaataaacttcatagctttcctttagtaacagtgttcattgaactacagcaatagactatcttcggttttctgacctcttgtttcaattccccttaagtcctgtgccagttatgctcctaccaacacagagtttcctgtcctctaatgtttaaaatagtatttactgttctgagctttatcctcccccgttaagcataaagaacactggtctgagaactaggagacctaagttctagtcctggctttcctggtaacttaagcgttatgccctttgacaactgtcttcatgtctctgcttgttagcactctcatctgtaaaatgaagaggttggcccaggtcttctccaactctgattctgtaatttggactcttggttccaaaaatattgatttccccactccaaccaccaagagaactatttaccctgtttgtagtgtacacaaccttttcttttgtaagtcatatttacctagattttgttcaagaaaatctgggtcccacttagctgttttagaaactagtacagacagagactctcctgaggaaattagagcttttatgattagaaacatgcttgtctaaaaatgagggtcttagaaatcacaacattgacccttatgatgttgccccttaagctaatagtgtaattccttactggtagttaaaaatctaaagtggactgaagtgatcttgaatcttcaaagagaggaaaactgtgctggaaaatgttattgtttcattgatgccttcaaaaaaatgcgtattaaacaaagactatactccagattttcttctgggcattggggaagcaaacaaaatagacttaaaaatcctcatgttcatgaagcttacattctagtagaaggagtaaggcaataaacataagtaatttatgttagaaaatgttaagtaggatggaaaagtgtagattatggtaaggtaaatcttttgtttgttttcttaagagaagaacaatgtttaaaagagtgatcaagcagggcatggtggcatgaccctattagtcccagctacctgggaggccgaggtgggagggtcacttgagcccaggagtttgtggctgcagtgagctgtgattgcaccactgcactccagcctggatggcaaagcaagacctcgtctctggaaaaaaagaaaagaaaaagtgatgatcagggtaggcttcattaggaaggtcacatttgcatgaacactttgccttttctttctttttatgaaagttttaaacatagtttttttgttttttgtttttgagacggagtttcactcttgttactcaggctgcagtgtggtggcaggatctcagctcactgcaacctccaccttccagtttcaagtgattctcctgcctcagcctccccagtagctgggattacaggcatgtgccaccacacccagctaattttgtgttttgagatggggtttcaccatgttggtcaggctggtctcgaactcctgatttgaggtgatccgttggcctcggcctcccaaagtgctgggattacaggcatgagccaccacgcccagcctaaacatacagtttaataaatcctccttgtaccttacccagcttctgtatttctttaatcaagggagaagaattatctaaaaggacagttgcccaatgggcttgagctgatgatagtggcaaagaatttcattttttaaaaatgcataccacctgccctttataaaaaaatttaaaccctaatgtatttaattttataattcataaaaatttaaatattggaactaagaacagagcaaagcaaagggaaaaagcactcctttgttttcaaattgcacaaactgtccctggagattctgatagtctctcatctctcttaactatcactgtaaacaacatagaaagcataagactgcaagaagtcagttatacacaaaacaaaatgaagcacagtggaattttctctttctttatctgtatatttctgaagttggtaaagcaactatcttctctattttacagaagagaaagctgagacccaaaaagctattcatagtgatagagctagaactaaaactcagatctcctcatctcagcccagtcttctcagtagctcagactgctttctataatgaacaagaaagaataattagggatttgtattttggcacaaaacagtatcaaatttttattgtaaaaatccacaaatctgacattttatcttttattctagccaggatgtattcttcatttgcatgtgtgtgtttctcttagaaagtggtgctctcaaacctttcaaagcacagaatttattgtaccctctttatttttaccaaattgaaacgtttcaggatttcagaagcaaagtgcaatccaattgtggctggagttttcctgatagaggatccgggtggttccctcccctccaacttctggctactgccctttatttcctttgtgcaatagaattccctgaaacagattatgtcgtaattatactgatttagtcaggataatgggaaaagcgacaaatcggatttatgtattaggtattatggagctttctttagcactctcctccaagtttaatctctgacatgtgtgatatagtaactttctgtctctgagaagcagtttggacccagctgaaaaattttatttatggagacttgtaatcagcctgatatacagagaacactctggactggaaatatagtcaggtaccaaggtctgctaatttggccattgccagtgattcaaaaccacctccccaccctgagtaaaagatttgatatgaatatgaatgctatgagtctcctggtgatgttttgggtgtatatgttcctgtgwgtgtttggaaatcatagagggtatttaccttgagggctcttttgttgaccttatttatttgaaattcttattttatttgtaatggcatatgtatatttttgtgatgctacatgcaatctctgtgtatactttttgtatatatgtatacatatttgtaaatatattggtatgcagtgatacagtatgtgtatattatgtacccatacccattgtgggctgaatttatttaagttctgtgaggacatcctagtggcattgttcatgctgctgtaattaggttgtggctgtatctcattcataagcctctattttgagaggcttgtgtttggataaaatgggctaatttggagttgaaattaggatatgaagatcttaacagaaagctagatatttattcttagctttaaaatcacctgcaaatttttatttaaactgatgataaattagtgatataacctgaaaaacctaagtatgtgaaactgagacaccagcagattcttaggctgtagtagtcctttattttcttgatccatatttaagtattattactgagtagtaaattatgtatattggggcttaatagagaggctgtggaaaaaaattgctttaatcacatttaaaaacataggaaaatgtccattaaataggggaaatatattcccagttgtcatttttatgcctcatactgaattttgattttggaacaattcttttttcatcagtgttttatgtgtctctatgaggcagaaaagggggcattagctaagggatggcctaacctaagtaggataggatttagtgaggaacgggaggttgttaatttgtatatttgcagcagctatgattaatttagtcctgtcttggcatttccggctacagattttttcttactggacttgcatatcaaaggtgagtaggctcatctgagaaaatgcttccactgaataaaatgccttcactcgtattgctgtgtctctatgagaccacttgtgttctgcaagttgatgatatattcgcacatgaagtagagtttttaatattagatgcatggtgtgctataaaaatctgggccttcaaacctctcccaaggatgatagggttggggaggataagagg

SEQ ID NO: 6813 - DNA, 14879 bp, Homo sapiens
agactatgagattgaagaagtctatacataaacaaagctggggttaaattcatttaaatgagttcgaagacacttgtccagtaagatgaaaacatatacagagtattatgaataccaccacattagatacaagattgaatattcatatgattaagtaacaggcgtctttagcatttgtttgaaggtgagggagaagtgtcctcacattggatagctagtcatctgagatgatttgcaaagccatctgtctctacactgccattcatctcagctttctctacatttcacagtacttaaagactatgccaatgattttggtacttaattatatcttgccctgaaatgtcatttgacagttttggttacccatgtgtaatatttttatctagaatgtatcagcacctagcacaatgctaaatatatatttggtactatatgaattcaatttccttagattatgaccaatgttgctttgacattattaggataccattgttttattcttacattggattaaaaaaatccaaacacctagcacctatttaccattttcactgtgggtttcaatggataaaaccagatatcaacttggatacatccaagattagacagctccctgtgtaactatagatataagaaagaaaaataagcctcagtgtcttttgaatcttgctctcagttaaggttcaacataagccctgacatctttatttatttttgtttttatgtttaattttatatatgcatgtatgtatgttgagacaggttcttgctctgtcaccgaggctggagtgtggtgacatgatcactgatcactgcagcttcccaggctccagctatcctcccacctcagcctcctgagtagctgggaccacaggtgcatgccactatgcccggctaatttttgtgtttttggtagagatgaggttttgccatgtttcctgggctggtcttgaacccctgaactcaagcaatccatccgccttggcctcccaaaccaaagtgttggggttacaggtgtgagccactgtgcccagccagccctggcatctttttttttttttttttttttttttttgagatggagtttcgctctgtcgcccaggctggagtgcagtggcgtgatctcggctcactgcaagctccgcctcctgggttcaagccattctgctgcctcagcctcccgagtagttgggactacaggtgcctgccaccacatccggctaattttttgtattttgtttgtttgtttgtttgtttgtagagacggggcttcattgtgttagccaggatggtctcgatctcctgacctcatgatctgcccaccttggcctcccaaagtgctgggattacaggcgtgagccatcgcacccggccccagccctggcatctttaagtagctttgctaaccattcctgtgtccttagtggtctttcaactgctgggaataaatagcctttactgtcagtgtgaatggttctgaaaactaactgcatgatagaaccacctacagagttcattaaaaacatagatgcctgttagcccaacgtggtggtgggcgcctatagttccagctcctagggaggctgaggcagaagaattgcttgaacctgggagcagaggttgcagtgagctgagattgcgccattgcactccagcctgggcaacagagtgagactccatctcaaaaaacaaaaaaacgaaaacaaaaaacaaaaaacgcagatgtctgagcacatccccaaaaataattaattaaatctttattgatgagacctggatatctgcattttaaaataaattctacaaaggatgctaaccagattttagaattgctggtatatgtcgcttctttataacttatatgttttggattaatgatgatctttttcgtcacgtgaagactatcttcacaattagactataagatttctctaggtaagagacagtatatttatatttcctgtggttactcgaatatgattttgcttaattaatatgtcttgcttttgtgaaacacatttaacttgtctactgatgatggatcaaattgtgaatattatttccttttttcatccgagaagctaggattaaattcctttaaatgaatttgaagaattttgtatttataaccagagtcatgggttgtattccaagtaaagctttttttattttttatttttttatgagataggatctcactatgttgcccacactggttttgaattcctgggcttcatatgatcctcccatctcaatctcctgagtagctgccagataaagtttttgaaaagtgttgttgaattgggaatcttttttctcttagaaaaatagaattaatttttttttaatagagatggggccttgctatgttttccagatgtttgccaggttggtcttgcactcctggcctcaagcaatcttcctaccttggcctcccaaagtgctaggattacaggtgtcagccaccgcacctggccattgtgcctggccaaaaaatataattttaaaaagaccagaaagacttttctttagaggtaaagatgaatgagcctatgttaaagtgtcattgaaagaaattattaatggtcagtcgtggtgactcacccctgtaattccagcactttgagaggcttaagtagaaggatctcttgagcccaggagtttgagaccagcctgggcagcatagcgagaccctatctctacaaaaaataaataaataagatgaaaaagaagttatttattcttcgatcatgatggcaggcaatcaaagaatcttggaggcatactagttagagcttttaaccccacaggtcttcattgtccacatcggtgatgaccatttttttagtagacaaggcaagaacttaatgaagagaattactttacgtttcttgaatttactactgaagagttataggtagctaatagctaatattttcgtagctagtgttgggacacggaaaccaaccccccaaaatatggtgctttgatgggctgaactgtatagtatatctgatatatttatatagtgtataaaaaatcacctgacacaatagatggataatatatctgatatatttatatatcgtataagaaatcacctgacacaatagatatgtaatatatctgatatatttatatattgtataaaaaatcacctgacacaatagatggataatatatctgatatatttatatattgtataaaaaatcacctgacacaatagatggataatgtatctgatatatttatatattgtataaaaaatcacctgacacaatagatggataatatatctgatatatttatatattgtataaagaatcacctgacacaatagatggataatatatctgatatgtttatatcagatatattatacatttatatattatacatatacatttatatatatacataataaatacattgtattatacatatatgtatatattatacatatacatttatatgtataatatagttgacatatttatatatttatatcggatatattgtacatttataatatatttattatattttatattatagtatattatcatttataatatattgttatatgttatatgatatatatttatagcagacatagtaaatatctattgtgttaggtgattttttatacaatatataaatatatcagatatattatacatttaaacagttaaacacctaaacagcccaattttatgtggatcagtactactaacggcttagggtaaaatgacagctacagcataactagaatgttaaagtggcatgtctcagacaacgtggatggacataaagtatttgagagaatattgcataatagaaaaaaacattgtaaagactaaaatactaaataagacctttttttcccgagcaataatttgcccaggctggtctcaaactcttggcctcaaatgatcctcctgccttggcctcctaaagcattgggattataggcatgaaccactgctcctggccagaattcttgattaaacaatagggtctaaataaatttaaaccccttttattctttttattcttacagggtagactcaaatattctatttctttccaactttatattcttgtcataacaacccagtattctctgaggcaaatggatgcttatgaccaactggcctgaaatgggggaatatagggttagtggtgagtcacatataagaaaatgcaagagaatagcagtgtatcatatttcaaaataaaatacaaactatacataaaactgaccccaacaagtatccatttcatttcctgtcgtgtatctatatgctttcctggaaagaataaacttcagttcacaaaatcagatgtagaagatacatcacttttaaaaattctacgtaattttaattccaagattcccatgccaccaggctggtgggaaatccagttttagttgtaattaggccttttctccagtattacatatgaatttgagtgtaataccccaaaacttgagaaggccattgtatctccagtccactggggcaatgaatagcttgagcacctgatcattataatgacccagatgtgtatctttttcttttactctgcggtgagtttttctaagggaggaatcctattttgtttaattttgtattatagcatgggatattgtgcctggcagatagtaggcaatcagttagtatttcaggaataaacactcttggtcagtgatacagctaatgatttgcaacaagcatatccttaaagtaccttttcagtaacgatttccatatgaacaaagaaaaaaactagaaccaagaggtaaaattataatcctgttgtcttgttcccatagccatactctgatttcttttatgttctgtgccctggcttgatacttaatttgacagctaattataatgtttattaagctctgaaatatactttctcctggcctttttgtctgaagttgtttgaggtgtcaccatggttggaagttaagagcatggaagctagacttcttggtcttgaattctagctttgtcactaacttagtaactttgggcaaattacatgtctctgcttcaatttcatttgttaaggtagtacctatttcacaaggctgatggtggcagcagtggggcgtccagagctgccgctgccatcacgccagctgcagcagggaggggcgggcagcggcggcggagcagctgcgggagccgcagtggctgctgtgggacatctgtgcctcgcgtcccctgtgccttgagaccccaaagcagccgactgcgccgccaccatcctcgcgttgccgggtggggcgacgtgctccccggccaggagcctccaccgctccggaccctggccctatgtcgccgctctcgcccgccgccgccgcggagtgggagtggggaggaggggaacagtccttggagccggccccgggagtactcccggagcctgccgccctggaagccgccacgatggaccgggctgagtcgcccgccggaggggaagcagtgtagtcgggcacggaggggcaggcagagaggggccccaaggcggagctgggtccggggcggagcggtgttcgcacacaaagcgctggggctggacccagggttcggggccaaggcgagaagtgggagcggggcccgctttggggacccggacagcggtgtggccaccgcgcacacctccgacagcgccgcattcctgggccttgggaggaggctctgagtagggccgcctggggcgcgtcttcagggtcctcccggcactggggtgaccgccgagctagacgcgcctgagggctgagccccagggctcgtgatctgctcccggaggcgccccccaggcagggccgtgagccgggcgagggagagtcctgggctgcccctgagccccggggccacgggaagaacttgcagcgacgtcatccctgccccggacacagtcccgggcccagggaggacctggaacattcccttcctcccccccccccccgcccccgcccatcagcccagcctgcaaggaggcgccaccggacctgcacactcaggagcaggtgagccagggacaagcaggagccccgccccttccgaactggtggagcaggagctcccagggtgcagctgcagccaccttgccgcggctgtggacattttctgtgctctcagaggcccagcaaagtcccctgcccactgcaggctccagggtgcctactccggctgcctggcttctctccactgttagcacccactctgaactcagagcaaggtcgggccgagcctgggtactgtcacagcctggccgagcgtgcacacgctcaggacagtgctgatacgccagccccctgccgtctcggccccctttggaacttgggcaccaacaagcgtgggagggaggctgagaggggtctgaagacagctggacactgacttkcaggcgctccttggcatgaacagcctgggagcaggaggcagacaggttcctgggtggaaggggatgggtccccagtgaagtcccaccctgaagctggtgagggcttgaagcctgcagaccagagaggtaacttgtggtgctgctccctgggcccactcatggctgcccatggaccaatcagcatgcatttcctccctctgaggctcataaaatcccccagactcagctagattggaagagaggatgggaagacaatggatgacctacctgtggagagaaactacccattccagaacctcctctctgctgaaagctgaacactcaatgggaagacctgtttgcagagaggagccagccactccagggtctcckttctgctagaagctgaacactcgttgggacacmcttgctgtggaaaggacatccttactgtggaaatgagctactaactgcaggtctccttcctcttcatcttccttatccttctgttccattgctcagtaatgctcctcttcatctgtctcattctccacttgtctgcttgatgcaggagctgaggagctgcacagcaaggttaaaagagctgtaacacaaacagggctgcaacatgccccttgctccccacagggagagaagagctctggccctcggagaagcccagacctgggagctccttgagcccgggctgtgactccctctttggggccctggttggcgtcactgcattcgccagtgccactgttggaagctgcttgtgatgcgcctggtccagggggaagctgtttgttgtgtgcctggtccagccacctcatggagagcctgtgctggcacctggagctgcccaacctgggcagcagcttgtgtgtgtgactgcacagtggccacgcttgctcacacacccctagcacacccctctgctccacccgtctcaatctcccttggatccgggatccaggttggtagcaagtgcgagtgggcagaagcagcccagtgggcccagagcaaaactcaggcaaaggtgccactagactggccaggaaagcgacaccctaaagatcccataatgctgatatgttaattctattctataagcaccacacagaagtgatagcttttatttcttattttgtctagcctggagacagagctaaggattccttgaactgcaaagtcttttccagttcttagtttatacaatccatactcaccttctgcctaactaagcattgtcatttttgtgccaaatgaagagtaggactcctacgattgtcctcagactctcttggctcaatcctcctgctttaacctttcctacttcaaaaactcctgaagttttgcttccccttctatagaatggaaatatatgtcgcaatacttactgcaaagaaaattatatattttaaaaatagactaaagagatgttgtgagacatcagacatcaatcagatgttgtgagaactgatttctgcatcagaatatctccttgactttacagctatcctttaatcctggctcaaagttccagaagaaagatgatccaatataatactcctatttggactttgagtcatacacattccttcttctgagaaaacgtgcttctgcatgaatcctcccttcattattttcagctcatctattattgaatctgaaaccccaggttaactgactgatcactctcatcagtggcagattttgktgtaacataggacacatcactcccaattcaggtcaagtcccaattatcttgcctctcaatatgacmtgttcaatgttgtatttcattctacttcattttaatgtaaaaagtcttttctggtgaagtcagtcttttattttctcataaaaattcaccctttgggtttttcatagggtattcccataaccaaacacactttacactttcctagtacataacccaatactttcttctttccccacagtccttacatgaagcctactcagaccgacatcactgtatcatttttttgtattctgaagtccttcagcacttgattcctttaagtttaatcttggtattctattgggaatcatatggaaatgtacaatgatatttattgaatgaacaggaaacagggaaagacattgaccagaaaaagtgtttattcatcaagtctttaaagatacaaaaacacgtgtcttctgkggagctcwgaraacaggactccagcaaagcacttttcagccttgtggtcttcaagcatttccaagatctgtgacattggaaagaaaaaaaattaagacagatttgggtctccatgagcagagagtattctttsccttagttctgggtagcatagtgcccaaggaaacctaatcagtacagwgggaaaccaaatctattccaaatcattacccataagcaatcctatggactctctgaggtttgacagagtcagcggccctctccaataaatgtgtttttctataataatgtgcagtgtgagtaatttgatgtttttgacaaatatttacccagcgttttatgaaggagaaggtttgggggacaagctgaaggagctctgactgccttttggaggagtgtgagtggcttacctttgctgcaaggagcattgtactcagcaattgcaaactcatctgaaaaaaaaaaaaccaacaaaaaaccagaaatcattacatgaagtgagaaagaaagcaaacatctgtgggatacaggccaaggaaggagtttgttgtgggaagaacagtattgtaccagaaacataagcatcattcatctgatgtgttgcttgctaccttatattctcctttcaaatatagtgttttatatattcttttatcccaaactcctgaaggactcttcagatgttctacttacttaaatctcatattgtcatacagtccatttatctgatgaaaagggaactaaatatcccacaggtgttttgtattagtagttgataaatttataatgtaggttgtttctataatgtatgtataagagacaaaaagaggggcatcagacttgatggagacaaaatgaagtgataatgtaattacttaatgtaataaataaccccaacacatctcctaaacctgaatttctgtgatcaggaattaaatatttctacgtgaaaatcactctcactcacccgtctcgtagtaatcatagactttcactatggctggtttcagatctcttactgggacatcttgcagaaccgtgaagaacaagctcagtgtctgatttgacacctggaaagcaaaagtcaattaaatgacctttcaggaagctttcttctctctttgaattagtttaagtattcacctgttttttgggggaaaagctttattatcctacagcacactatagggtccttaattaaattgtgcagaaatctctcagaggggatgataaattctccagattatttcttaaataactaacataacgcatatacctctgtcaatgccaatacatagctctgttcatgggggtaaatgatatatactttttattggatgactaactgtgttcattttttaatatccagagatttggtatagtttgacttctctgtcttgcaggaatacttgcgtagactcaaagaggctctaaaaggttgatcttcccaggcttaagtttcataaaatttgtaaactataattcccatcaacttatgcatgaacaaactctcctaccacacatatctataaaatcagattggtttactggtgaactggtcttattattttatggttcaagtccttgtggagactgacagttttttttccctttcatattgttgttgagtatgttgataattaactaataattgactaatcacaagggctacttccttatattactgggtatccaaaaaacttgtcaacataataaacacattttgtcaagatttcttgcttatgggattttaggaatattcatatcccaagatcataataagccatttctacctgtaatccctggtgaaatataaataaaggagagaagaacattcttttagagttaacattagaattctcaaatttctagcatggaagtgatgtttctaaaatgcatttaccttcccagatgttcccttagaggattattatctacgtttttttgcaaatagactggaagttctcttaccttatcaaggtaaatcaagacatggttgctgctgacttctgtccggctcacatggttagatctttcaagctgaagaaaattgaaataccacaaatgttaataaatagatgaaacccctgggggatccagagaaaaaatctttgtattgccaaaataaccctgagggtagaattcttcaaatgctttttgtaaggaaatatataatgtaatacaattaaaaatgaaaggcataaagggtttactattagtataacacacgactaatgtgtaaagttatttatctgaagaaaagacagctaagtatcctaaacttggtagttactcatatttcaaagttcaattcagtttctatttcttcataaggagtttttttcctgttttgcttgctctatttttcttttaacttctgtaatacttatagtttatgccaatcagtcattttcatatttttcactggttcgtgttcatatcttttatcttcttagcaaaattctaagctaagaagaaattgaaaagcaggaacctgctgacaatctttttcttgtagtcatgggtcctagcgcagtgctctgcacatggtcagcattcatacaaacacatgtgattatatttctgagctggaaaaaggataaggctttgatagagattgactttaatagtattttgatattagtattgtcttatgctggggatacatacatcattaaataaaatagggcagtctggggttatgataaacctaccattttcactgttggcttcaggggaatgaagccagagaccatcttcacatcaacgatcgccatgttggaggcagagcggctccctgtgtaactgaggatccaggggaggaaaggattagggttttctgtgtttttaaatattttcttcttctatgtccatgttaagcattccacagctctaaaaggtacacgtaagtcttcccaaatatcttatcccagtggtttgtaaaagtggtgtgcgtagaatttttaggaagcctgttaaagccacagagaccaggccctactctagacctgatgaatcagaatgtctagtgtatgggggctgaggatctgcattttttttttttgatggagtttttcgctcttcttgcccaggctggagtgcaatggcatgatttcggctcaccgcaacctccgcctcctgggttcaagtgattctcctgcctcagcctcccgagtagctgggattacaggcatgcaccaccacgtccgactaattttgtatttttagtacagacggggtttctccatgttggtcaggctggtcttgaactcccgacctaaggtaatctgcccgccttggcctcccaaagtgctgagattacaggcgtgagccaccacgcccggctgaggatctgcattttaagaaagctctacaagtgatgcacaggctgtttgtgacctctaatctatgccagttattttatttatttgtttacttttattttctttcagctgacaaaatgatgtatattatgaataataaatttcagtctacattatttacaaaaacaacaataatttataatgtttacttaaacactggctttcaacaaaacacttagaaacacctagcgtcttgtccccgagagtttgcatccgaaatttggactgcttaatttattttttggcatatatatacaccaaattaaatgaaaaaaatatatatatatatacttaacttttaggttcaggcgtacacatgcaggtttgttatataggtaaactcgtgtcatgggggtttggtgtacagattactttatcacttgggtactaaattttgcactgaattgttgtttttttctgatcttctccctcctcccatccttaaccctcaagtaggctctggtgtctgttgttctcctttttgtgtccatatgttctcatcatttagctcccacttacaaatgagaacatgcagtgtttggttttccattcctgtgctagtttgccaaggataatgacctccatctccatccatgttcctgcaaaggtcatgatctcattctttttgatgtgtgccagttatttgttacatgtattttgtcctaacttttttcctgaatagtatctccaaccaagtaataatatgtttgtggagagagagttttttatcagatctgcagctatttaaatattgatgcatataagtgtatcttccccccaaattaattatatcatatataacctgagatttattattgccagtaggaattctaactaaggagtcactacttccttctattcaaacttttcaataattcttcatctctatcttcaataaagcaagaataatataggatttcattacataacaaggaattcaggtcagaggcaatgggtaatatttacttagttgttattgagggaaattattaccctttaaacaatgaggttgcacaatagtagatcctggatggacaatgtaaaccccatcattgagaaattatatcaacttaagagaatacattgcattttttgtgaatagtgcaaatatctactgttgcactgctttacttaaagaggagttcccgaaagaagactggtggttattcttaggattaggtgatagagtcagaaggtcttacctgacacttagggagatttggaagctggtgtgggctttgggttcatcacaagtttgaggcagagtctgcactcctaaagcaaaggggaactcttccttttctgggagaatattgtatttcaaggatgtctatagaacatcaaagacaaaatcagttttttgccctttcccagaattcctgtccacgtccctaaccctttctctgatctgtcccattgttttctgagttaggacttctcagagagaacagctgctgtcctcatctgtcctgtcctcacctgcccaagagtctcacctggaggtagacacatccttctcctgtcactttcatgctgtattccccaggcagctctggcaatgagacctgctgcagtaacaggcggttgttgttgtccacttggaatttgctggaaaatgtccctgaagactggatagtcacctgtgcagccttcccagtcctggtaaatgtggctgctccatatttggacagagcatggagagccaccactgtgtcctgttagagacagatgagtgagagaacccattgggcattataaggctttgagggctgagatatttttcaaagacccatgtgagggactttgatttcctacttccctcactacttaaatataggagctgtaatttcaagattgattataatctttagatagttgaagaaccataacattcacatatctaccttggactgtatgccctacatgtttattttatttatcagaaaattgatccttttctctctgtaagtatatgtgggacatggaatgtggaaaacatgtgaatggcaatcagttattggcatcagctatttgctaacatgtctttcttgacaactatgctcatatctgccaccactcaagcaaagttcagtctggctctctcccatattaaactttgctcagttgctgaggtcagtgtcctggagagaacccaaggttctttgcagccatgagcagagtcatgcttcagtttctccaaaagaaataaaagatgagtattataattatcttctggatttaatgacatttttatttggctttccctttttattggatgatttcctgttcccagtgaatgtctgctggtatgtatcctcaacaacattaaacctgcttggcctccttcaaataatatgtttctaataaatgaatgataacctttaacaaaattacttagtttttttcattcatatgataaaagattaatacaatggaaataggatggaatgccattttgtcacattttttccgttttagggtatataagcaaacatccgaattctctgaagataaaactttctgctgtgtacatatcaatgaattgttcagatacatggttatatagctagatttaggaggttggatgaataaagacagttctttatgctcctgatgaataaatgtttgtgtattaagaggtgaatagggggctggacgcagtggctcacacctataatcctagcactttgtgaggccaaggcggatggattgcctgagctcaggacttcgagatcagcctgggcaacatggcaaaacctcgtctctactaaaaatacaaaaattagccaggcatgattgcacatgactgtaatcctagatacttgggaggctgaggcactagaatcgcttgaacctgggagatggaggttgcagtgagccgagattgcaccactgcatt

SEQ ID NO: 6814 - DNA, 14693 bp, Homo sapiens
gaggcctaggcgggcggatcactggaggttaggagtttgagaccagcctggccaacaaggtgagacctcatctctactaaaaatacaaagaccatgtctactaaaaatacaaagattagccgggctcggtggctcatgcctgtaatcccaactatgcaggaggctgaggcaggagaatcgcttgaatcctggaggcagaggttgcagtgagccgagaccgccactgtactccagcctgggtgacagagtgagactaggtctcagaaaaaaaaaaaaaaaagaaaagtcatttttatttcctttcctatgaattatctgttctgaactgttgcctattttcctattgtgttgttagtctttttcatacttcttacttgcctatgatgtgattatttttctcaacttgtcatttgtctgagtttgcttatggtgtcatgattgttgttatgccatataagtttttaatttttatgtagttaaatttgtcaatcttttcttttatggcatctacattttcttttctttcttttttttttttttttttgagatggagtctcagtctgttgcccggggttggagtgcagtggtgtgatctcggctcactgcaacctctgccgcaggggttcaagcgattcgcctgcctcagcctcccaagtagctgggattacaggcgcctgccactacgcctggctaattttttgtatttgtagtagagatggggttttaccatgttggccaggctggtctcgaactcctgaccttgtgattcgccagtctcagcctcccaaagcgctgggattacaggcatgagtcaccacgcccggtctggattttcaatcatacccagaaaggtcttctcattgcaaaattataaggaatccatgctttcttctgtttttctagtacctttatagtgtcatttcaaaatacacacatcttttcatcacttgaaacttgtttagagtaataaacttttggagattcaacctgtaggtttttttgactacccaattgtctcaaccccttttattatttattaatttatttaacaacacataacagaatcatttattgaaaacagtactctggaaaaactatgtgcacaacaatgcctgtttcacccattttacagtgggtacatggtggtctggggcattcgtcaacttgctcaagcctttaggtaagtagagtttgcggcttttctgagaatctgcctgcatgttccctccttccccagcctcccaagccatcctgtggttcagacacctccacctcgtgcagccaggctctcaacaaagccagtaatccaatgtgttggcttgcactgggcttgcatctgtgtctccaggatgcacaaggggttccaagccccatggacacattgtccctggtttagctaaagctggtgagaagcctcagaagtggcctgacacctttctgtgacaggacagggttcaaattcaacatctaagaccccaggatgagcggagggtagagggtggtgagcttgcccactcagctccctgagtattgctggagtcccaggtgctactttagttttatttctgcatgtactttagtcatttctgtactttgctctgttccattgtgttttttttgtgtgtgtgtttgtgcatgtgcacgcacaccagttttaataacttaggctctataatatgttttaatatccaacagggttagttcccacctccttgttcttcattttgaaagcctgtttctggactagttttgtttggttttctatacgaattttaggaacaaatagggtaattaaaaaaaaagaacgaaaccacacacgacctattaatcctattagtacttttattgggattatgttaaatttaaattttactaaaggagaattgagatcttcatgaacccacagacgtcattcatctttccattagactgttttatttgtaaaatgagagtaataatagtaccaatctcgtgggactgtcctgagaattaaatgagaaaatgcatgcgaaatatactggggtgaacacgttgctttgccacttagctgtgtgaacttgggcatggtaggttattctgaacattgctctctcatttgtcaataaggataatactagcatctggagtcacaggactccaatgacggtgaaattagacaaagcgtgcaaagtacccagtgctctgcctggaacataagtgcacaataaatattagctgtttttctgtttttctaaaacataggccaccccagggcaaggaagtgcgactcaaagcaaaagcagctgggcgcggtggctcacgcctctcatcccagcattttggaaggccgaggccagcggatcacttgaggtcagaagttcgagaccagcctggccaacacggtgaaaccttgtctctgtaaaaatacaaaaaaattagccaggtgtggtgacatgcgcctgtagttccagctactcgggaggccgaggtatgagaatcgcttgaatccgggaggtggaggttgcagtgagccgagatcgcgccactgcactccagcctgggcgacaaagtgagactccgcctcaaaaaaaaaaaaaaaaaaaaaaaaagcaaggaagaaaaaaagcaaaagcttggagggatccacctcaagtggagggccccaaggtcaactcatctttcccaggacctatgtcaccgtcggtacccacttctgactttcctggtgcgtctggaatgggaagccgcgatcccgagtgtaccaggccgctcagggactccaggacccagccccggacccagggttccggcgctgccacgtctcgcgcggtcagctagccagacgggagcaggcggggccgaggcggggccagaccccgagcgcgctttgtcacgccttatgcccgcccctccgcggcccgagtcgctggtgggacggcaccggggcagagaggcgtaacgctgtgagggggcggggcccattacgcgcccggaagtcccggggaggggtgtgacgtacatccggcgagtagctggcggtcccgggtgctgctggttagtgtgctctgagggagggtccgagccagccgctgttttgccggaggagcccctcaggccgtgagtctgagggtcgcgtcggggaggggagttggggctcgaggggctgggacggaaggcggggaggtcggagcggaggctggccctggcggggttgggggggggggaagtgacacgcaggcggttctgtggggccgcggggctgattctgggcggggacgggacaacttggccagatctgctccgtcccctgctgtcctctttgcctggggtccacttgcattccgctcgggggtctcgcagctgctgggccggataacagtttcttgtctgtaccgtgcgctccggtttacgaaatggctccatgtcctctgtctcggaagagcctcacagccctcggtgaggcgggtgggagccctttatgattatccttgttttgtagactcggagactgaggctggccaaggctccgcagttagcgagtgtgagcgctcgaacctggtctacaggcccctagtccagggcttacccccaagtcagcgcttggttgtcttccgatggcccgggtcgaaccctgtattttctccttctcccttccccttttcccctgtctggtctctgcatggaaaaatttccttatgtgcatttgacatggattagcgttttcttcacgattctagccagtgggtcaggagcatctttgtcttgttgattccatcggcttcggttgcgacagggggcttagggagattcgccatggggctgacctttgacatttaccccgcagctaagcagagttagctaaaagccagccgcctactaccccaaatctgcctggaatggcgtcttaaagttgccctgattatgtataacaagtaatgcgtaaatttttaaattggctaatggtcagattggtgccctccttttctattaacatttgtttgaatcatttagccctggaattcgcaagttttcattttaggtacattaatagtgttttgttgatagtttagagacctaccttaaattttagattactcttaacttctcgtaaggtggtacaatggaccaagaatagaaaataaatagaatgctagttattaaaataccattcaaaagatgtgatgagttgtaaggaagagaacttcggaagatcatcctctgtgtagttggtgggttaaagaagttttagtttttttttttttccccagcaattttgtggtttgggtttgaattttatgtactgttaacaggaagagcttaggctttggtgttagagatgagggtttaagccctggcactattactttttcaactgagccgtcttaaaggactcagcaaaactaggagtatcctcatctttatcttgttaaatgaggccagtgatccttgcctggtagggttggtgtggggatgaaatgagatgtacaagtactgtgcagattgtaaaactactgatgagttggtacaaatcctaagatcttaaggagagaggagccaccaaggccattttcagctgctgaggaggctgaggtgggaggatctcttgagcctgggaggttgaggctgcagtgagccatgatggcaacactgcacttcagccttggagacagagtcttggtctgtcttaagaaaaggggggcgggggcattttcttaactttgggtagcagtgcaacccgactctttggatctagtaagggtttttattatttttagctcacctgaagagtttcttcagtcagcctccactctcatcactcctttacaacccaacacttctatatacatttgtactacactggttttcagtcaatactttacagacttgtaaaaaatgtttacatcactttagaaatttttctttctttcttttttttgagatggagtttttgctcttgttgtccagactggagtgcaatgtcatgacctcggctcactacaacctctgcctcccgggttcaagtgattctcctgcctcaacctcccgagtagctgggataacaggcgcccaccatgcctagctaatttttgtattttaagtagagatggggtttcaccatgttggccaggctgatctcgaactcctgacctcaggtcatccacttgcctcggcctcccaaagtgctgggattacaggcatgagccaagtattttcaactagatgaattctgcaaaggtgaaaaggagaaaatgccacactttaaatagtttttcatggcaattgaactactttaattttccattttattttcctttgacactcctgcttttaagccatctcctcccttggagcatacaaatcagcagcagccgggatttagctacttggatgctttaattcttccctccaaaatgatctgagtgggaatgaccttaatgaggggtgtgctctaaaggtgagctgtgcttctccaggcagtagattgagaaaagtataggaggatgtttggtttgagggagttgcagaggaagggcacattgttcttttacttatttacagtaaatgggaatttcagcacaggagctttattaagtatatttaagttgttggactccttaaagtgcggactcaatttccagagaaaactattagttaatgtgataaatgcagtctttctgctgaaatatatttgttattgaaaaggcaaaaaagaaatcacctcatttagtattttttcgtaagagcctagtatgtatccacccaaactgccaaactttatttggctgtctttggtaagggccgtgaaaaataaatattaattaggccctaaaatttacagattaggccatgggcctgataaaaacccagtaattggatgaaaaacataccagctctacttttcaatttactcttttttttttttttttgagatggagtcctgctctgtcacccaggctgaagtgcagtggagcgatctccgctcactgcaacctctgccttctaggttcaagcgtttctcctgcctcagccttctgcatagctgggattacaagcaagcgctgcygcgcccagctgttcattttattcttcatctggcattmtttgaatgtaaggggatttttttgtgggtaatgcttttactggttactgttcatgaaaattttgaatgcagttggtcatatctagtataaagccctgtgttcagatgctcctgctgatggagaggagtaaaagtgtggaccttccatttttctgcaccrcatctgagatactaaagcaaaaattcagcatggccagacaatgctgagaaaccttaagacccaccagtgtgtctagatcctaccctcttaatttcattcagaggtcattttgcttattaccaatatatgtaaaccttttagtagcttttgatagctatgagaaacaatagaaaaagtagtgttaatatcagtaccagttaagttatttactggcttgggaacttactgctatatcctgaaaagtattctttttttgcttttttgtttcttgagacagggtcttgctctgccacccaggctggggtgcagtgacacaatcatagctcacggcagcctcaaattcctgggctcaagcaatcctcttgcctcagcctcccaagtagctggaactacaagcacgtgccaycatgcctgactaattttaattttttttttttttttttgtagagatgcaggtctctctatgttacccaggctggtcttgaactcctgaggtcagggaggaatcccccacctcagccttgcaaaatgctgggattacaggtgtgagccacgggggcccggcctgaataagtattcttattttaagaaaatctatttgtaaaatgagtttgggtgtgattattcatgtatgaaaagattctcttcttatcccttaatggttctctaaaatagtgatgtcatttctttttataaattgagacccgtgtctgcaaaaatgattaaatattgagatarcattggtaaatggagcagggcaagtggtgctggccagtagaattttgggtgacttttgttttttagagttgtttacaggatagattaatatgtttttcattcaaatcaatgtgcttttcattsttattttctatttagtgcatctaagtggcattctgattcacattattgataagactgatttcctagagttgttcttcactggatgacagcagtcgtatgtctagggaatgtgaatgaaccgctgcctggaggagtaagtcacacagtaaaagaaagtgtaggcatacctcggatatactgtgagtttagttccagactactgaaataaaacaagtacagtaaagcaagtaacacgaatattttggtttcctagtgcacataaaagttacgtttacactatactgtagtctgttaagtgtacagtagcattacgtcttagaaaatacgtaccttatttaaaaaatactttatggctaaaaaatgctaacaagcatcggagccttctgcgagtcataacctctttgctggttggggatcttacctccatgttactccacgttgatagctgttgactgatcaggttgatgattgctaaaggttgggatggctgtggcagtttcttaaaataagacaacaaggaagtttgttgcatcagttaatgcttgttttcaagaaagatttctctgtagcatgcaatgctgtttgatagcattttacccaaagcagaatttatttcaaaattggaaccagtcctcttaaaccctgctgctgctcaagtaagtttatgtaaactcaagtaagtttttgtaattttctaaattgttggtgtcatttcaacrgtattcatagcatcttcaccaggactagattccatctcaaaaaaaccactttttttgcttatccataagaagcatctctttatccattagtttgatcatgaaattacagcagttgtcacatcttcaggctctacttctaattctagttctcttgctgtttctaccacatctaaggttacttcttcctccaaagtctcgaacccctcaaagttttccacgagggttggaatcactgtcttcctaactcctgttaatattgatattttgacctcttcccgtgaatcataactgttcttactggtacctagaatggtgactcctttccaggaggttttcagtttactttgcccagatccagcagagaaatcagtctatggcattgatggctttgtgaaatatatttctttttttttttttttttttgagacggagtctcgctctgtcgcccaggctggagtgcagtggcgggatctcggctcactgcaagctccgcctcccgggttcacgccattctcctgcctcagcctcccaagtagctgggaccacaggcgcccgccactacgcccggctaattttttgtatttttagtagagacggggtttcaccgttttagccgggatggtctcgatctcctgacctcgtgatccgcccgcctcggcctcccaaaggaaatatatttcttaaatgaaagactggcaaatcgaaaatactccttgatccatgggaagcagaatggatgttgttagtagacattaaaacaacattaacttctttctgcacctccatcaaagcccatgggtgaccaggtgcgttgtcaatgagcagtaatatcttcaaatctttttttctgagcaataggtcttcacagtgggcttaaaatacttagtaaaccatgctgtaaacagatgtgtggtaggcagagtagatttagtataattctttttttaattgtaatttttttaattggaaaacaaatacacaacttggaatggatttgaggcaaattgtgccataagcacattttctttaagtggctaaacaaagtttaaaaagcaagtaacagtaaaagaaaatgtttctggtacaggaccagcagtacagaaaaaacagtgtgtgaggtacctgggagtacctggataatacacccattctgcagtagtgcaacttttaagtacatattgttggctgtccgtagtccacacagagttacaactccatacttcaacaccatgctgacagttcctaaagaaaactactttaaaaaaaggcataacccggatgttcccttatttgaccaactccacctaagtttagatgtgcagaagggcttagatatatccggagtaagccacaggcaacatgttacttcatcagttttctaaaataaggtttcagggcaatgacagtaagggaagaacacatggaggaatgaagtcctgattaccatacatgcatatttttttttgacagtagggagaagccttttacagataagttacaaacaaaaggcaaataaacagttttgtgcaagaaatttaacacattctgtacaaggtcttcattatgctgtcatcatttgtacaaactcatagtttacttgaccatcaccatcaggatctgcttccctgatcatttaatcaacttcttcatctgttaacttcactccaaggtttgtcatcacatggtgaagttctacaccactaatatagccattgccatccttatcaaacacacagaatgtttctctaatttcttcttcactgtctgtgtctttcatttttcttgccatcattgtcagaaattcagggaagtcaattgtgccattaccatcagcatctacttcattaatcatgtcctgtaactctgcttctgtgggattctgcctgagacctcattacagttcctagtttctttgttgttatagttccatcaccatctttgtcaaatagtgaaaaaacttctttgaattctacaatctgctcctcagtcagttggtcagccatgctgcaagtgctactggtttccgagacgcaaccacacaaccactctgctcgctcacttgctccacttggactgatttagtgtcattcttcagggccctaggattttcaaaatggtaaatgagtatgggtcctaggattttcagaatggtaaatgagtatgggtcctaggattttcagaatggtaaatgaatattggcctcaacgtaaagtcaccttgcattagcccataacaagagagtcagcttgccccttgaagctttgaagccaagcaatgacatctcccctctagctatgaaagtcctagatggcttttcaaatagaaggctgttttgcctacattgaaaatgtgttgtttagtgtagccacccaccttcatcagttatcttgctgcagcttctacatcagcacttgcttttttacctcgtgtttttattttattattattttttatcagcaataaggctgtttcattttcttgacgttcatgggtttgctggagtagcacttttaattttcttcaagaacttttcctttgcatttacaatttgggtaactgttgagtgcaagaggcctagcttctggcttatctcaggttttgatgtgtcttcgtcactaagcttaatcatttctaacttttgctttcaagggagagacctgttactttcacttggagaatagggaggcttggggtgggggcaggactgtggaggaagtcaagtttgctgtcttctatggttgtggtttgtggcacaacaaaacaattatactagtaataccaaagatcactgatcatagatcatgatgacagatataagaataatgaaaaagtttgaaatattgtgtgagaattaccaaaatgtaacatagagacatgaagggagcacatgctgttagaagatggtactgatacacttactcaactcagggctgcttccaaccttcaatttgtaaaaaaaccagaaaacctcaggatccacaaagtatcatcaaatgaggtatgcctttatatttttaactcctagttctctgagtatcatagatcaaaaactattaggaaacaagttatttttgcacatataaggattctagactctcctccagattgcaaaatctgtgtcaagaaagaatattagtttctctttactttgcttcctcccctccccttccatcccctcctccccttcccctcctcccctccccctcctcccctgccccgcctcccctcccctctcttttcttttcttttcctttcctttcctttccctttccctttccctttccctttccttttccctttccctttccctttcccttccctttcctttctcctgtcctgtcctgtcttttttatcagagtctccctctgttgcccaagtgagtgcagtggcaccgtcatgcctcactgcagcctcaaacccctgggttcaagtaattcttctgtctcaccctcctgagtagctgggactcttggtgtgtgtcattatgtccagctatttttttagttatttgtagagattgagtccagctttcttgcccaggccagttgtgaactcctgggctcaagtgatccgcctgccttggctttcccaaatgctgggattccaggtgtgagccaccatgcctggcctgctttcttattcccgaaaacaagagactataaatgtgcatcatggctagggaacaagagttaacctctccacaattgtactgtcattcagaaagctaatgtttgctactttcatattttatacaggtagtaagcattaataatgtctttcatctttgagtggatctacaatggcttcagcagtgtgctccagttcctaggtaaagccatttccttgaaatacaggtttcaaagtttgtgcctttccctcagtaatttaactacaaataggctttggtctgtagagagcaaatgtgttaacaatttttttctcttttaggactgtacaagaaatctggaaaacttgtattcttaggtttggataatgcaggcaaaaccactcttcttcacatgctcaaagatgacagattgggccaacatgttccaacactacatccgagtaggtttgaaaatatcaggtgaccttttgatctttaaaggtcagtgttaggcgtggaggatgaatccctagttggtggagttcttttattaactgaagtcccaaaagccaactcatacgagaaagttccctgtaagacacactcaggttatgtactttcagatctaaacctctggaactttgtcattatctgttgtcactggtcctgtaaagggacacctctcctatacctacttctaagaagtggaaaatagcttggaagaaaagaaacctttggcttttagaatagtttaagaacatttcacccttgtattccttttctttgttgggagtggggcgttgcctgggctggtctcaaaaatcctgggctcagattatcctcctgccctcagcctcctgagtagctggaactacaggcgggtaccaccacactcaacttcttgtatctttttctttacaagatgaaagcattgatattggcttatagtactagtagttgggggttgttgagttgacaagtttttttcttctttttaaacaatttttcagcatcagaagagctaacaattgctggaatgacctttacaacttttgatcttggtgggcacgagcaaggtaagtgatgactcagtggaaagcatgtttattgacttattttttttgtgcctcccagctccttttaaaagcagtgtgtcatttttaccttttaaattacttacattttagaattaggatcttattactttagtgaagttgttttattcatttatttttttaagtaatttcaaacttgtcaaaagttgcattaaataatacacagaagtccccttcaatattaccctattgagctgggataaagttagccataatgtataactattcatgaacttttaagtatttgcctgatatagccaaactcaactcaaatcttgactgaaaatttttacaaagcaggacagcatcttgccattttaatctttactacatttttacttattaatgtaatttaccttgtaactggaaaatatgttaaaagatatatgtattgcttcaacaagagtaattatttcatcattttaactaggcttgccctaagccagtatattttcttctataccttttgctcaaatttgttagtctcctcctccctacataatacatattaatgcttattttttatgaactgtttgtgagcatatcatgcccctttactctttaatactttagtgcctcttctttatataatacatattaatgcttgtttttaatgaagtgttggtgagcatatcatgcccctttactctttaatactttagtgccattttctaagaacaaagatatttccttgtatataatcataatagttatcaaatccaggaagttttatttttatccactctgtatttccttttttttttggtcagttgtcctgataatctcttttataccatttttttcatcttgaccaggtatacggtatcatatatctagttatgaagtcatttttgcatcctttattcaatggagtgaaagtatgtaggaaattaaatatttataagtaatttcagacttgtcaaaagttgcaaaagtaatacagtgactatgtgtgattactctgatacaagttgatattttgtatattctatccatttcagacagttggtggaacatttccttctacctttttgctttcctcagaagtgctttttgcctactcaggctatgtctttggtttccagattcctatcaggtgtttagagacatacagagtgtcatctttgtctgatgggcactcagttcacatttgacaagaccgtaggtataggagtaaaacatttaagatgtgagaataaatattctgggaaagtagggaaaaggaactattgagattctgtcagatttacttacttgttattacactgagtggagaagtcttgttttgaaacattaggttgagctaataccgtttttttcttttttttgagatggggtcttgctctgttgcccaggctggagtgcagtggcacaattttggcatactgcaacctctacttcctgggctcaagcaatcctcccacctgttttttgtagagactgggtttctgccatgttgcccaggctggtcttcaactcctgagctcaggtgatccacctgcctcagcctcccaaagtgctgggattatgggtgtgagccactgtgcccagcctaatacagtttttaaaaaatgtatagtaaaatataacattggtcatttctagttgttaagcctaataattttatagtcagtgatttcattaacatataattacattttaattaatttatttaatatttatgccctgaaaagtcatgtatattatgatcataatcacataaaataccagtaaagaaaagaggctggaagaaaatatcaaaatattgacaaggggtgtgttttgatagagggattagaaatgattttgtttcctttttttctgtaaggagcttgtatttttttcatttgggtaagaatgggtatatggtgtcctttctgctgcttccacaaaaggatttgtaactgcttacaaatttaaattcagagcaagataagactgaacctagaccatctggagaatgtagaaggaccagacgccagatggttttatatacctgaactgggaattgtagattgtttggtgtgataaatttaggtttcaggttttgttaaaagtaagaagggaaatgtattgatgtaattagttttgtttatttgactgaggaaaatctacttaacaaaaacacttttacataataacctagccacc

SEQ ID NO: 6815 - DNA, 1980090 bp, Homo sapiens
  misc_feature (1)...(1980090): n = A,T,C or G, or insertion/deletion polymorphism (see Tables 1-2)
ttttgtatgttctacaaggaatttttgttagattttttcttttggtacaatttttctgactaaaatgcagcataattgtctttattataggattgctaaggagtaatagtacggagacatctttgtggttttatacacacacacatatatatatttaacataagctgtctaaaataagtcacaaaacttgcagattagaaaaggaagcacattttggctgttttggtgtcagcatcttaattaagtagaaaatattatggacctataaattgaacttgcgactgttcactcactagagagaacaatttccagggagttagaatagtttttcctgaaggagagtcaaataaatttgggaaataaggttgctcttgtaaaacagtaatagatttagcttttattttttaatgataagaacattaaatgtcttctaagtcagaatcagagtatatctttgttaactgagctcaccaagacaaagtgataataacacaaaactgtggtttttggtagtctaatcaatttagaatgttttattgtcatgttagttgattttctgtctttatttgtattttttcttatcctggttatagagacttttaaaatctatgatttaaataagttgtgtttttcccccctaggttcttttgaagtaaccagtgatcttttttgcttaccctcatcaacagaatggatgaagatagatttgactgtgtgctttttcaagtggagaatatgaatatacagaacaagaaagcaataactccaacctgtttgattccgtctgttttctaaataaagacactatgcgctggaaataacatagcatgccgtgtgacttgttctttatatcagttcactttggtccagatatctagacttgatttctagctccacatgtcattccctttttttctactcttcgccttttgctcttgagtcctttggttcttaacagactgatttctatgataccttctaaaatgattactcctcttttggcacataggtgagcactattcaatggattttcccctgtcctttttaatcacacttttatctgtccatgctgaatagttgttgctgtactttttaatctctgaagaaatgcaaactttttaaaaatttcaccctgaacatcatagagtgtacttacacctatatggtacagcctactatacacctgggctatgtggtatagcttactgcttgtaagctactatcctgtagagcatgtgaatactgtagacaattgcaacgcaatggcaactatcttattaaaatttaatggccggacacggtagctcatgcctgcaatcccaacactttgggaggctgaggcgggcagatcatttgaggtcaggagttcaagaccagcctggcctggaaaccctgtctctactaagaatacaaaaaattagtggggcatggtagcgggcacctgtaattccagctacttgggaagctgaggcagaatcccttgagcccgggaggcagaggttgcagtgagccaagaacacaccactgcactccagcctgggcgacagagtgagactccgtcaccaaaaaaaaaaaaaaaaaaagcatgatgctgggcatggtggcctacgcctgtaatccagcactttgggaggcccaggtgagcagattgcttgaggtcaaagagttcgagaccagcctgaccaacatggtgaaaccctatctatctctactaaaaattatatatataaaaatcagccaggcatggtggcgcataatctcagctactcaggaggctgaggcaggagaatcgcttgaaaagccttagctgggcatggtgcctcacgcctgtgatgccaacactggtaggttgaggtgggcggctcacttgagcccaggagttcaagaccagcctgggcaacatggtaaaatccggtgtctacaaaaaaatgagcccagcgtggtggtgcacacttgtcccagctactcaggaggctgaggtggcaggatcacctgagcccaggagatcgaggctgcagtgagccatgatcatgccattgcactgcagcctgggtaacagagtaagaccctgtctcaaaaaaaaacactttgattatcatcatttaacaagtttattgttaaagcatgcatggtagtgtcaccttggatcctccaaaaggcagacaccaaggtggagtcagatacactagagctgtactgagggaaatgcctgtgagggatacaagggagagggatcagtaggcagggaaggccttcagaatgcaatgtgcatgtgacagaagagagagaagagaactcaaacctcagctgctctgagagtctcccagcctgatgaggaatctcagagcagattacctattaagagcagtcccagattgggcagagatggcctgactactagtccagagcagcctggggagaacacatggttttcatgtgagtgctgtaacagatcaggaggactagcagctggtggctgtcagatttgttacttgcatccagttttcttgagaactgagtggcacaattccactccttaacactgcacagatccactttacacctttgggtagcccctccacagttccatgagcttctgatataaactccacatcacattgcatcttttcctgccactgataccctcttatactataaagtttatcagatcatgtggtccagtttgtagggctgcttgcatcatagcctgaatcttaattttcaacagccctttcttgctccaaggccctactcaagcctaacatttttttcatgtcatttactatatgggttggagtagtgtttctaggtggaatgtcttgctttctgaatctagagaaccccagagttacagtgcttgcttccttgtagcaggtgatgcaaaatgtagtgtgtctttttactttgtagagtattccagcatgcccatgtcccctggtctcctagaacccttaaaggaatggcagatcctggccgggagcattggctcacccggtggctctgggattacaaagcctgtaatcccagcactttgggaggccgaggcgggtggatcatgaggtcaggagtttgagaccagcctggccaagatggtgaaaccctgtctctactaaaaatacaaaaattagccaggcgtggtggcgcgcacctgtagtcccagctacttgggaggctgaggcaggagaattgcttgaacccaggaggcggaggttgcagtgagccgagatcgtaccattgcactccagcctgggcgacaagagcaaaactccatcttaaaataaaaaaaaaaaaaaaggaattgcagatccccaaatctatgtagagtttctctctcacctgggacacatagcaaggcttccggtgtgctagctaccttacattcattttgcttatttagcatgatgtcattgatgtaatgttctatggaatgcccagatggcccacgtattaggccattcttgcattgctataaagaaatacctgagactggttaatttacaagaaaagaattggctcatgttcctacaggaagcatagcagcatcttccttcctgaggggaggcctcaggaagcttgcatttcatggcggaagccaaagacagagcaggtacatcacatggtgaaagcaggagccaatgggggaagatgccacacacatgaccagatctccagagaactcactgtcatgaagacagcagcaagctacgcaggatctgcgcctacggcccaaacacctcccacgaggccccacctttagcattggggattacagttcaacatgagatttgggcagagacaaatatgcaaactatatcattccatcccagcccctcccaaatctcgtcctcacattacgaagtacaattacgccttcccaacagtccccgcaaagtcttaactcattccagcattcattcaaaagttccaagtttcaaatccaaattcttatgtggaaatgagttccttctacctatgagcctgtaaaatcaaaacaagttatttactttgaagatacaatgggggtttgggtattggctaaacatttttgttccaagtgggacaaataggccaaaagaagggttacagagcccatccaagttcaaaacctagcagggcagtcattaaatcttagactccatattccatatccagggcacactgctggcagggatggactcccaaggccttgggcagttctgcccctgtgtctttgcagggttcacccctctcaggtgctctcacaggttgttgagtgcctgtggccttttcaggctcagggtgcaagctgcaggtgcatctaccattcttgggtctggaggatggtggccctcttctcacagctccacaaggcaatgccccagaagggactccatgtggggcctccaatcccacatttcccctccgcactaccctagtagaggttctttatgtgggctccactgctgcagcaggtttctgcctgaacacccaggcttttccatacatcctctgaaatctaggcagaggctgccaagaacccaccactcttgcactctttgtacttgcaggcttaacaccatgtggaagccatttacaacttgtattatccaaagtggtagcttaagctgtacttcggcccctttgaaccctggctggagctggagcttccgagaggtagggagcagtgtcccaaggctgtgcagggcagtggagctctgggcctggcccatgaaatcattctcccctcctaggtctcagggcctgcaatagaaggggctgctgcataggtctctgaaatgtattcaaggccttttttcattgtcttgactgttagtgagaggtgacagcatgttggtggtcctcacagccctcgctccctcttggcgcctcctctgcctgggctcccaatttggtggcacttgaggagcccttcaacccaccgctgcactgtgggagcccctttctgggccggccaaggccagagccggctccctcagcttgcagggaggtgtggagggagaggcgcgagcgggaaccggggctacgcgcggcgcttgtgggccagctggagttccgggcgggcgtgggcttggcgggccctgcactcggagcagccggccggccctgcgggccctgggcaatgaggggcttagcacctgggccagcagctgcggagggtgtactaggtcccccagcagtgccagccctctggcactgtgctcgatttctcgctgggccttagctgccttcccgtggggcagggctccggacctgcagcccgccacgcctgagcctcccaccccctccatgggctcctgtgcagcccgagtctcctcgacgagggccaccccctgctccacggcacccagtcccatcgaccacccaagggctgaggagtgcgggygcacgcaggggactggcaggcagctccacctgcagccccggtgcgggattcaccgggtgaagccagctgggctcctgaatctggtggggctttggagaacctttacaatccctgagctagacataaatacaccaatcggcactctgtatctagctcaaggtttgtaaacacaccagtcagcaccctgtgtctagctcagggtttgtgagtgcaccaattgacactctgtatctagctgctctggtggggccgtgaagaacctttatgtctagctcagggattgtaaatacaccaatcggcactctgtatctagctcaaggtttgtaaacacaccaatcagcaccctgtgtctagctcagggtttgtgagtgcaccaatggacactctgtatctatctgctctggtggggccttggagaacctttgtgtggatactctgtatctaatctgatggggacgtggagaacctttgtatccagctcagggattgtaaacgcaccaatcagcgccctgtcaaaacagaccactgggctctaccaatcagccggacgtgggtggggccagataagagaatgaaaccaggctgccccagccagcagtggcaacccgcttgggtccccttccacactgtggaagctttgttcttttgctctttgcaataaatcttgctactgctcactctttgggtccatgctgcttttatgagctgtaacactcaccacgaaggcctgcagcttcactcctgaagccagcgagaccatgagcccgccgggaggaacgaacaactccagatgtgccgccttaagagctgtaacactcaccgcaaaggtctgcagcttcactcctgagccagcgagaccacgaacccaccagaaggaagaaactccgaacacatccraacatcagaaggaacaaactccagacgcaccaccttaagagctgtaacactcaccgcaagggtccgcagtttcattcttgaagtcagtgagaccaagaacccaccaattccggacacattttggcgacccagatgggactttcgcctatcaccaagcggtgagaccatcacctatagctgagcggcgagaccatcacctatcaccaagcagtgagtaccacggacccctttcacttgctattctgtcctatctttccttagaattcgggggctaaataccgggcacctgtcggccagttaaaagtgactagcacggctgccggactaaagacatgggtgtcaggctttctgggaaagggctaacaaccccaactcttcagagttgggaccattggtttgcctagcaccagcttccacttttcctgtacttctgggctgagccaagggtcgacagagaggaaagccatgcagctccagggtcccgacaacaagttggttgaccctgcggccatgagtggaactctcaaaggcctgtcgcccaagtgagactcgcccatctatcctatctatcctgacccttgccccctgggtcctaatgcctgccagacaaacttcctctcgcctctcttctctgaggttagtcctgcttctaaaaattgctacctgtctctggtgcttttctagtttctcctataagaatgatttctagtataaactccaggtctctgctactttctgtaggcacccgggctcaccaatcagaaagacacaatttttgcccaaagccccattgtagtggggactacctggaattttaggatccctcctcagactaacaggcctaacaaaagctattcctgaagctaggatatggggagcctcagaaattgtatccttcctattcatgtaagcgaggacaaaaggtgtcactcttccaatcctgaagatcccttccctccctcagggcatggccctccacttcatttttggggcataacatctttataggaaaggggtaaagtaccaatactgacaggagaatgcttaggactctgacaggtttttgagaatgtgtcggtaagggccaccaaatccgatttttctcggtcagtcctccttgtggtctaggaggacaggcaagggtgcaggttttcaagactgcatcagtaaggaccactaaatccaacgttccttggtcctccatgtggtctgggaggaaaactagtgtttctgttgctgcatcggtgagcgcaactattccgatcagcagggtcctgggactgttgctggttcttgggcaggggttgtttctgctgctgcgtcggtgagcgcaactattccgatcagcagggtccagggacctttgtgggttcttgggcagggggagaaacaaaccaaaactgtgggcggttttgtctttcagatgggaaacactcaggcatcaacaggctcacccttgaaatgcatcctaagccattgggaccaatttgatccacaaaccttgaaaaagaggcggctcatttttttctgcactatggcttgggcccaatattctctctctgatgaggaaaaatggccacctgagggaagtacaaattacaatactatcctgcagcttgaccttttctgtaagagggaaggcaaatggagtgaaataccttatgtccaagctttcttttcattgaaggtgaatacacaactatgcaaagcttgcaatttacatcccacaggaggacctttcagcttacccccatatcctagcctccctatagctccccttcctatgaatgataatcctcctctaatctcccctgcccagaaggaaataagcaaagaaatctccaaaggtccacaaaaacccccaggctatcggttatgtccccttaagctgtagggggaggggaatttggcccaacccagctacatgtccccttctccctctctgatttaaagcagrtcaaggcagacctggggaagttttcagatgatcctgataggtacatagatttcctacagggtctagggcaaaccttttacctcatttggagagatgtcatgctactgttagataaaaccctggcctttaaggaaaagaatgtggctttagctgcagcccgagagtttggagatacctggtatcttagtcaagtaaatgatagaatgacagccgaagaaagggacaaattccctaccggtcagcaagccatccccagtatggatccccactgggaccttgactcagatcatggggactggagttgtaaacatctgttgacctgtgttctagaaggactaaggagaattagaaaaagcccatgaattattccatgatatccaccataactcagggaaaagaagaaaatcctcctgccttccttgagtggctacgagaggccttaagaaaatatactcccctgtcacccgaatcactcgagggtcaattgattctgaaagataagtttattacccaatcagcctcagatatcaggagaaagctccaaaagcaagccctgggccctgaacaaaacctagagtcattattaaacctggcaacctcagtgttctataatagggaccaagaggaacaggcccaaaaggaaaagcgagatcagagaaaggctgcagccttagtcatggccctcagacaagcaaaccttggtggttcagagaggacagaaaatggagcaggccaatcacctggtagggcttgttatcagtgtggtttactaggacactttaaaaaagattgtccaatgagaaacaagctgcccccttgtccatgtccactatgctgaggcaatcactggaaggtgcactgccccagaggacgaaggttccctgggtcagaagcccccaaccagatgatccaacaacaggactgagggggcccagggcaagtgccagctcatgtcatcaccctcactgatccccaggtatgttcaactattgagggccaggaaattgacttcctcctggacactggcgccgccttctcagtgttaatctcctgtcctggacgactgtcctcaaggtccgttaccatccgaggaatcctgggacagcctgtaaccaggtatttctcccacctcctcagttgtaattgggagacttggctcttttcacatgcctttcttgttatgcctgaaagtcccacacccttattagggagggatatattagccaaggctggagctattatctacatgaatatggggaacaagttacccatttgttgtcccctacatgaggagggaatcaaccctgaagtctgggaattagaaggacagtttggaagggcaaaaaaatgcctgcccagtccaaatcaagttaaaagatcccaccacttttccttatcaaaggcaatatcccttaaggcctgaagttcataaaggattacagaatattgttaaacatttgaaagctccaggcttagtaaggaaatgcagcagtcactgcaacaccccaattctaggagtacaaaaaccgaacggtcagtggagactagtgcaagatcttagactcattaatgaggcagtagttccactatatccagttgtacccaacccctataccctgctctctcaaacaccagaggaagcagaatggttcatggttctggacctcaaggatgccttcttctgtattcccctgcactctgactcccagttcctctttgcttttgaggatcccacagaccacacgtcccaaattacgtggatggtcttgccccaagggtttagggatagcccttatctgtttggtcaggcactggcccaagatctaggccacttctcaagtcgaggcactctggtccttcaatatgcagatgatttacttttcgctaccagttcagaagcctcatgccagcaggctactctagacctcttgaactttctagctaatcaaaggtacaaggtgtctaggtcgaaggcccagctttccctacagcaggtcaaatatctaggcctaatcttagccagagggaccagggccctcagcaaggaacaaatacagcctatactggcttattctcaccctaagactttaaaacagttgagggggttccttggaattaccggctttgccaactatggatccccggatacagtgagatagccaggcccctctatactccaatcaaggaaacccagagagcaaatactcatctagtagaatgggaaccagaggcagaaacagccttcaaaaccttaaagccggccctagtacaagctccagctttaagccttcccacaggacagaacttctctttatacgtcacagagagagccaggatagctcttggagtccttactcagactcgtgggacaaccccacaaccagtggcatacctaagtaaggaaattgatgtagtagcaaaaggctggcctcactgtttaagggtagttgcagcagtggccgtcttagcgtcagaggctatcaaaataatacaaggaaagcatctcactgtctggactactcatgatgtaaatggcatactaggtgccaaaggaagtttatggctatcagacaaccacctacttagataccaggtactactccttgagggaccggtgcttcaaatacacatgtgtgtggccctcaaccctgccacttttctcccagaggatggggaaccaattgagcatgactgccaacaaattatagtccagacttatgccgcccgagatgatctcttagaagtccccttaactaatcctgaccttaacctatataccaatggaagttcagttgtggagaatgggacacgaagggcaggttacgccatagttagtgatgtaaccatacttgaaagtaagcctcttgccccagggatcagtacccagttagcagaactagtggcacttacccaagccttaaaactgggaaagggaaaaagaataaatgtgtatacagatagcaagtatgcttatctaatcctacatgcctatgctgcaatatggaaatagggagttcctaacctctggggaaacccccattaaataccacaaggaaattatagagttattgcacacaatgcaaaaacacaaagaggtgggaatcttacactgacaaagccatcaaaatgggaaggagagggragaacagcaacataagcagctggcagaggcagcagaaaggaaggaagagacaggaagtcaaagaaagagacagagagtaagaaacaaagagaagcagtcagagtgaaagagagacagaaagacaaagtcaaggagagaaaaagagatggaagtagtaaagaaaaaacagtgtaccctattcctttaaaagccrgggtaaayktctatctacccagccaaggcatattctacttatgtggatcttcaacccatatctrcctctcaracagtttgcaagaaataacgaaatctatccttactttacaatcccaaatagactctttggcagcagtgactctccaaaactaccgaggcctagacctcctcactgctgagaaaggaggactctgcaccttcttaggggaagagtgttgtttttacactaaccagtcagggatagtacaagatgctgcccagcgtttacaggaaaaggcttctgaaatcagacaacgcctttcaaattcttataccaacctctggagttgggcaacatggcttctcccctttctaggtcccgtggtagccatcttgctgttactcgcctttaggccctgtatttttaaccttcttgtcaaatttgtttcctctagaatcaaggccatcaagctacagatgggcttacaaatggaacccaaaatgagttcaactaacaacttctaccaagggcccctggaccgacccactggcacttcccctggcctagagttcccctctgaaggacactacaactgcaaggccccttcttcaccccatccagcaggaagtagctagagcggtcatcggccaaattcccaacagcagttggggtgtcctgtttagaggggggattgagaggtgacagcrtgctggcagtcctcagccctcactcactcttggcacctcctctgcccgggctcccactttggtggcacttgaggagcgcttcagcccaccgctgcactgtgggagcccctttctgggctggccaaggccagagccggctccctcagcttccagggaggtgtggagggagaggctcaagcgggaactggggctgcgtgcggcgcttgcgggccagctggagttccgggcgggcgtgggcttggcgggccctgcactcagagcagccagccggccctgccggccccgggcagtgaggggcttagtacctgggccagcagctgtggagggtgtactgggtcccccagcagtgccagcccaccggcgctgcactcgatttctcaccgggccttagccgccttcccatggggcagggcttgggacctgcagcccgccatgcctgagcctcccacaccccctccatgggctcctgtgcggcccgagcctcctcgacgagcgccaccccctgctccacggcacccagtcccatcgaccacccaagggctgaggagtgcgggygcacgcaggggactggcaggcagctccacctgcagccccggtgcgggattcaccgggtgaagccagctgggctcctgaatctggtggggctttggagaacctttacaatccctgagctagacataaatacaccaatcggcactctgtatctagctcaaggtttgtaaacacaccagtcagcaccctgtgtctagctcagggtttgtgagtgcaccaattgacactctgtatctagctgctctggtggggccgtgaagaacctttatgtctagctcagggattgtaaatacaccaatcggcactctgtatctagctcaaggtttgtaaacacaccaatcagcaccctgtgtctagctcagggtttgtgagtgcaccaatggacactctgtatctatctgctctggtggggccttggagaacctttgtgtggatactctgtatctaatctgatggggacgtggagaacctttgtatccagctcagggattgtaaacgcaccaatcagcgccctgtcaaaacagaccactgggctctaccaatcagccggacgtgggtggggccagataagagaatgaaaccaggctgccccagccagcagtggcaacccgcttgggtccccttccacactgtggaagctttgttcttttgctctttgcaataaatcttgctactgctcactctttgggtccatgctgcttttatgagctgtaacactcaccacgaaggcctgcagcttcactcctgaagccagcgagaccacgagcccgccgggaggaacgaacaactccagatgtgccgccttaagagctgtaacactcaccgcaaaggtctgcagcttcactcctgagccagcgagaccacgaacccaccagaaggaagaaactccgaacacatccgaacatcagaaggaacaaactccagacacaccaccttaagagctgtaacactcaccgcaagggtccgcagtttcattcttgaagtcagtgtgaccaagaacccaccaattccagacacattagcactggctccttttttttttagacggagtctcgctcttttgcccaggccggagtgcagtggcgcgatctcggctcactgcaagctccgcctcccaggttcatgccattctcctgccccagactcccgagtagctgggactacaggcacccgccactgaacctggttaattttttgtatttttagtagagatggggtttcaccgtgttagccaggatggtcgctatctcctgacctcatgatccgccagcctcggcctcccaaagtgctgggattacaggggtgaaccaccgcgcccggcctcactcctttttaattacgcaaatatctctagcaagtggttgctccacagcctgcttgtatccctcttttgagaaagctttttctttctttgccacatgggcagactacaaaatttccaaacttttatattctgcttcccttttaaatgtaagctccaactttcttcatcatttccatctgagactcagcagcttggatctcgctgtccatatcactatcagcattttggtcacaacaatttaaccagtctctaagaagttttaaaccttccctcatcttcctgtctttttctgagccttccaaactctttcagcctctgcctgttacatagttccaaaatgacttccacattttcaggtatctttatagtaattccccaccccggtgccaattttctcttagattgctatacagaaatagctgagactgggtaatttataagaaaagaggtttaattggctcatggttctacaggctgtacaggaagcatagcagcatctgcttctggggaggcctcaggaaacttccaatcgtggcagaaggcaaaggggaagcaggcacatcacatggtgaaagcaggaacaaggtcagggggcagatgctacacacttttaaatgactagatctcgagagaactgaaaagacagtaccaagctatgagggatccacccccatgatccaaacacctctgggcaggccccacattcagcactggggattacaattcaacatgagatgtgggtggggacaaatatccaaactataacagcctataattcacattttatcatcaaaggagcaaatattattcttggggcaaaactgagtaaatattgtcgtcccacatggatgtgaactatttctagtctctttcctgatagaagtaggggaaaaaatgcatttactaaatcagtggctgtgtattatgtacctcacacttagtacccctactgtgtgcagtcattgagtggaagtaaaccagaaagtggcctcagtgtgagaactgaggtggatccaaaaatggcagctggctgggcatgatggctcacacctgtaatcctagcactttgagagcccaaggcaggcaaatcacttgaggtcaggagtttgaaaccagactagccaacatggtgaaaccctttctctactaaaaatacaaaaaattagccaggcgtggccgggcacagtggctcatgcctgtaatcccagcactttgggaggccgatgcaggcagatcacctgaggtcaggagttcgagaccagcctgaccaacacagtgaaaccccgtctctactaaaaatacaaaaactagctgggcatggtggctcgccactgtagtcccagctactcaggaggctgaggcaggagaatcacttgaacctgggagacggaggttgtaatgagccaagattgcaccactgcactctagctcgggctacggagyaagaatctgtctcaaaaaaaaaagaaagaaagaaagaaagaaagaaaaagaaaaaattagccaaacatggtggttcatgcttgtaaccccagctactcaggaggctgaagcaggagaatcgcttgaacctggcaggcagaggttgcagtgagctgagattgtaccactgcacttcaacctgggcaacagagtgagactccatccccactcccccayaaaaaaaacagcagctagaggctggccagggaactatgtttctcatagaggcctgcctgcctgcctgccttccttccttccttctttccttccttctctgtttttctttgacatgaattaaaaaataattttcattatgtatgcattaacattgttttactgtggcaagaacacctaacatgagttctactcaatggcattttaagcgcacaatgcagtattgtcatctacaggcacaatattgtatagcagagctctagaattcaccttgcataattgaaatgttatatccattgattagcaacttcccatttcctgcaaccaccattctactctctgtttctataagtttgagtattttagagacctcatataagtggagtcatggagtatttatccttctgggactggcttattctcttagcataatgtcctcaagttcattatgttgttgcatattgcaggatttccttttttaaagctgaataatattccatgtgtgtatatactacattttttaaatccattcattggtcaatagactttaggttgtttccagtccttggctaagaatagtgctgcaaatgaacacggaagggcagacatccaagatctcgatttcaagttttgtgtgtgtatttgtttgtttgtttgtttgttttttgataaatacccagaagtagtattgctgaatcatatcgtagttgtatttttggagaaacttccatgctgttttccatagcagctgcaccattttacagcaggttttcttaagggaggtctgggtggcatacctctatggctgtcaaagctcacaatgtacaaatagttctcaagaagagaataaatgaaggtaaaatccactgacacccctcccgttctggtgaccttactccctacagaaatcattgttaatatttacttgcatatacttccaaaatttgtatatccatttataaacatttcttaacccagtgggatcatgatataagcagtattccctaacttaacattacatcttgactgtcttgccatacaagcaggtatactgctgtctcaattttttaaacagcaacataaaattttattatttgtttctacrataatttatttccttggcttagttaaatgaaataactcagtattcttccaataaattctcactcccccctcccccgccaccattttttgagacagggtctcactctgtcacccaggctagagtgcaatgatgtgatcaaagctcactgcagcctcaacctcctgggctcaagagattctcctgcttcaccttcctgagtagctgggactataggcatgcaccaccacacgtggctaattttgaaaattttatttttatagaggtagggtcttgctatgttgcccagactgatctcaaactcctggcctcaagcaatcctcccacctcagtctcccaaagtactgggattacagatgtgagccactatgcctgatggatttttctcctttgcttacatttgtaacatgcagccacaaaattctaatacaagaaaagagaataggagacaggcacagtggcrtatttctatagtcccagctatttgcgaggctgagacaggagggtcacttgagttcaggagtttgaggctagcctgtgcaacacagccatactgcccatggtaatttatagattcaatgtcatccccatcaagctaccagtgactttcttcacagaattggaaaaaactactttaaagttcatatggaaccaaaaaaagagcccacatcgccaagtcaatcctaagctgaaagaacaaagctggaggcatcacactacgtgatttaaaactatactacaaggatacagtaaccaaaacagcatggtactggcaccaaaacagagatatagaccaatggaacagaatagagtcctcagaaataataccacacatctacgactgtctgatctttgacaaacctgacaaaaacaagaaatggggaaaggattccctatttaataaatggtgctgggaaaactggctagccatacgtagaaagctgaaactggaccctttccttacaccttgtacaaaaattaattcaagatggattaaagacttaaatattagacctaaaaccataaaaaccctcgaagaaaacctaggcaatacatgcaggccataggcatgggcaaggacttcatgactaaaacaccaaaaacaatggcaacaaaagccaaaattaaccaatgggatctaattaaactaaagagcttctgcacagcaaaagaaactaccatcagagtgaacaggcatcctacagaatgagagaaaatgtttacaataataatgtcagatattagcccatctgacaaagggctaatatccagaatctacaaagaacttaaacaaatttacaagaaaaaatcaaacaaccccatcaaaaagtgggcaaaggatatcaacagacagttctcaaaggaagacatttatgcagccaacagacacatgaaaaaatgctcatcatcactggtcatcagagaaatacaaatcaaaaccacaatgagataccatctcacaccagttagaatggcgatcattaaaaagtcaggaaacaacaggtgctggagaggatgtggagaaataggaacacttttacactgttggtgggactgtaaactaattcaacaattgtggaagacagtgtgacaattcctcaaggatctagaactagaaataccatttgacccagccatcccattactgggcatgtacccaaaggactataaatcatgtggctataaagacacatgcacgcatatgtttattgcagcactattcacaatagcaaagacttggaaccaatccaaatgtccatcaatgatagaatggattaagaaaatgtggcacatatacaccatggaatactatgcagccataaaaagatgagttcatgtcctttgtagggacatggatgaagctggaaaccatcattctcagcaaactattgcaaggacagaaaaccaaacactgcatgttctcactcataggtgggaattgaacaatgagaacacttgggcacagggtggggaacatcacacaccggggcctgtcgtggggtggggaaggggggagggatagcattaggagatatacctaatgtaaatgacgagttaatgggtgcagcacaccaacatggcacatgtgtacacatgtaacaaacctgcacgttgtgcacatgtgccctagaactgaaagtataataataaaaaaagaaaatttggcacatatataccatggactactatgcagccatgaaaaaggatgagttcatgtcccttgcagggacatggatgaagctggaaaccatcattctaaccaaactatcacaaggacagaaaaccaaacaccatgtgttctcactcataggtgggaattgaacaatgagaacacatggatacagggcggggaacatcacacactggggcctgttgtggggtggttggctgggggagggatagcattaggagaaatacctaatgtaaatgamgagttgatgggtgcagcaaaccaacatggcacatgtatacctatgtaacaaatccgcacattgtgtacatgtaccctagaacttaaagtataataaaataataataataataataataataataataataatgccttgctttcacaaaccagtagaagttatggattgacctgagtgacactagatctagtgaaggatagttgcaccatcgtagggatgtagtaggattaaagaattgccaaatctaattaacgtctagggagtataacgtatcaaaaagaaaagtcatttgtaccagttcaataaaaatcaattgaatatttgaacacacacttggggactgtaatcaaaatccatttttggtataattagaatatgagatcataacggaagcataaagtctgccaattcaatatttccaaagcaatttttatttcattatattccccactttatacctaattctacaggaaaacccattcaagtgaaaatacacaccaagatcagccagtcaaaaacaatatgtatttattgggcacagatcataaatatttcataaatatttatatattcagtgtatgtgggccaggcacagtggctcatgcctgtaatcccagcactttgggaggccgaggcaggtggatcgcctgaggtcaggagttcgagaccagcctggccaacatagtaaaaccctgtctctactaaaaatacaaaaaattagctgggcatggttgggcacctgtaatcccagctactaaggaggctgaggcaggagaatcgcttgaacctatgaggcggaggttgctgtgagctgagatcatgccattgcactccagcctgggcaacaagagcaaaactgtctcaaaaaaaaaaaaaaattcagtgtttgtgtaagcagagtaattctagatcacttcatgtaaagcatctctgccagaaagcatgaaatataatgctcctagtctgggttgaacagaactaactcttgataacataaacatattatgttatccccagagcagatttcccagttaagggcatttgccatgaagtcaagcaataagtaagacccaccaagtctattatttgcacaatagtctttaataaccctaggccatggagcactttgggtccaggaatggcaagaccagcaagaagatcactgactgtggacaactctaattaaagtttgactttttttttttatcttaatcaccggagcattccttctgccgctctggaaagcaccctccaccacatttggtcgcagtatcctagaatctttgtgctctcgctgcagttccctttgggttccatatgttccttattcccatccatgcctagctggattgctgccgagaccagcttggtcgtggagaccctaacccaacggtgctagaggaattaaagacacacacacacagaaatatagagtgtggagtgggaaatccgggatctcacagccttcagagccaagagccttaaacggagatttacccacatatttattgacagcaagccagtcataagatttactaaaagtattcctcatggaaaatgaagggatgggccgaaataaagggatgagcctggctagttatccacagcgtgaacatatgcttaaggcacagatctctcatgctattgttagtggtttaagaataccttaaacggttttccaccctgggtgggccaggtgttccttgccctcatcctggtaaactgatgactttccagcatgggtgtcaaggccatcacaagcatgtcacgacgctgcagagattttgtttatggccagttttggggccattttatggccagattttggggcctgttcccaacagattgcagagttaagtttatgattatgaaataaaaactaaataataaaacaaaaagataaattcaggagagaatatttgtaggatatagcaaaacctaaaaaacggagcacaggacttagatcacacctacaacaataatacatcattatgtcagtatcaagtgatgctgtttcctgtgctttcatagacattttcaagtagcctgcaaaagaaccctacattatatgaaattagtatttttggtattttcagaagagcacaagttatttgttttcctaaaaaagtacagagctgcatagcagaacatgtgtccatgtatcctgatttctagaaaagaaaaagaacattttgctgaaaaagccactgtgggccgggctcagtggctcatgcctgtaatcccagcactttgggaggccgaagcgggcagatcacgaggtcaggagatcgagaccatcctgggtaacacggtgaaaccccatctctactacaaaaaaaaaaaaaaatcagctgggggtggcagcaggcgcctgtagtcccagctactcaggaggctgaggcaggagaacggcgtgaacccgggaggcggagctttcagtgagctgagatcgcgccactgcactccagcctgggcgacacagcgagactctgtctcatttaaaaaaaaaaaaaagatttctctttctgaaacactttatactttacaggaagcacttccatctgttctactacttctcctcctctctcccatcccccaaaataataccatctaattcagaaaaatcagaaaaatggcttagtatagacaaggcagtgtctcakagargaaatgatatggctaggactaarggagaaggaccctgtccttcaaagaagaaagagagatttctgtttctttgaaagatttaaagttagaagagtcagaggatttaaagttagaagagtaagaagaataaaagcataagaaacatctggatgaaagagggtccctgaaacttctcagttgcttgctgatttacatgccattaaactttttctgacaactgtaacccagcttatagtctttgaaaatgagtcatatttatcatcagtagcacatattagggactcagtcatatgttattaagtagcatttctttagtattttgttactggacttttcatatgtgaatatcttacgttctgaaatgtttcccttgaagtcaaagaaaacaccttcacatatggttcctatagtgtctaacatgctgaaggtttgcacagtcaggtttcttctgataaaaaaacaagcaaactatatacacatatacaaactatatacatatatgtgtataatattatatgtatatagtattatatatattatatatatgtatatatatacaaactgtcaggcctctgagcccaagctaagctatcatatcccctgtgacctacacatccaggtggcttgttcctgccttaactgatgacattccaccacaaaagaagtgaaaatggcctgttcctgccttaactgataacattgtcttatgaaattccttctcctggctcaccctggctcaaaagctcccctactgagcaccttgtgacccccattatgcccgccagagaacaactcccctttgacagtaattttcctttacctacccaaatcctataaaacggccccacccctatctcccttcactgactctcttttcggactcagcccacctgcacccaggtgattaaaagctttattgctcacacaaagcctgtttggtggtctcttcacatggacgtgcatgaaatttggtgccgtgactcagatccggggacttcccttgggagaccaatcccctgtcctcctgctctttgctctgtgaaaaagatccacctacgacctcaggtcctcagaccaagcagcccaaggaacatctcaccaattttaaatcgggtaagcggcctcttcttactctcttctccaacctctctcactgtccctcaaccactttctcctttccactcttcaatctctcccttctcttaatttcaattcctttcattttctggtaaagacaaaggagacacgttttatccatggacacaaaactccggcgccggtcacggactagggaaggcagccttcccttggtgtttagtcattgcagggacacctctctgattatttacacacgtttcagaggtgtcaaygcaggagggacgcctgcattggtccttcacccttagcggcaagtcccgcttttctggggaaggggcaagtaccccaaccatttctctccgtgtctctaccccttctccacctttctggggggcaagaaacccccaaccccttctccttcactcttagtggcaagtcccgcttttgtagaggaggggcaagtaccccaaccttgtatctctgcgccccaatcccttatttccgtggcccaacctcttatatctctgcgccccaatcccttatttccgtgccccgacctcttatctctgtgccccaaccccttatttccatgccccgacctcttatctctgtgccccaccccttatttccatgccccaacctcttatctctgtgccccaaccccttatatctgtgccccaacccctttcccacttttctggaaggtaagaacccccgaaccccttccctccatgtctctactctcccttttctctaggcttgcttccttcactatgggcaaccttccaccctcctttcctccttcttctgccttggcctgtgttctcaaagacttaaaacctcttcaactcacacctgacctaaaacctaaatgccttattttcttctgcaatgctgcttgaccccaatacaaactcaatagtagttccaaacagccggaaaacggcactttcaatttttccatcctgcaagatctaaataattcttgtcataaaatgggcaaacggtctgaggtgcctgacaaccaggcattgttttacacatcagtccctccctagtctctgtgcccagtgcaacttgtcccaaatcttccttctttccctcctgcctgtcccctcagtaccaatcccaagtgtcgctgagtctttctaatcttccttttctacagacccatctgacctctcccttcctccccaggctgctcctcgccaggccgagctaggtcccaattcttgctcagcctctgctcctccaccctataatccttttatcacctcccctcctcacacctggtccggcttacagtttcgttccatgactagccctcccccacctgcccagaaatttactcttaaaaaggtggctggagctaaaggcatatagtcaaggttaatgcgccattttctttatcccaaatcagatagtgtttaggctctttttcatcaaatataaaaactcagcccagttcatggctcgttcagcagcaaccctgagacgctttacagccctagaccctaaaaggtcaaaaggccgtcttattctcaatatacattttattacccaatctgctcccgacattaaataaaactccaaaaattaaattccagccctcaaaccccacaacaggatttaattaaccttgccttcaaggtgtacaataatagaaaaaagttgcaattctttgcctccactgtgagacaaaccccagccacatctccagcacacaagaacttccaaatgcctgaaccacagtgtccaggcattcctccagaacctcctccggcaggagcttgtacaagtgccagaaatctgaccaccaggccaaggaatgcctgcagcccaggattcctcctaagccgtgtcccatctgtgcaggaccccattggaaatcagactgttcaactcacctggcagccgctcccagagcccctggaactctggcccaaggctgtctgactgactccttctcggcttagcagctgaagactgacgctgcccgattgcctcggaagctccgtagaccatcacggatgccgagcttcgggtaactctcacagtggaagttaagtctgtccccttagtcaatacggaggctacccactccacattaccttcttttcaagggcctgtttcccttgcctccataactgttgtgggtattgacggccaggcttctaaacccctgaaaactcccccactctggtgccaactaggacaacactcttatgcactcttttttagttatccccacctgcccagttcccttattaggccaagatattttaaccaaattatctgcttccctgactattcctgggctacagccacatctcattgctgcccctctccccaacccaaagcctccttcgcgtcttcctctcatatccccccaccttaacccacaagtatgggacatctctacttccctggcaaccgatcacatggccgttaccatctcattaaaacctaatcacccttaccccgctcaacgccaatatcccatcccacagcacgctttaaaaggattaaagcctgttatcactcgcctgctacagcatgggcttctaaaacctataaactctccttacaattcccccattttacctgtccgaaaactggacaagtcttacagattagttcaggatctgcgccttatcagccaaattgttttgcctatccaccctgtgctgcccaacccgtacactcttttgtcctcaataccttcctccacaactcactgttccgtgcttgatcttaaagatgcttttttcactattcccctgcacctctcgtcccagcctctcttcgctttcacttagactgaccctgacacccattaggctcagcaaattacctaggctgtactgctgcaaggcttagtagacagcccccattacttcagtcaagcccaaatttcatcctcatctgttacctatctcggcataattctcataaaaacacacgtgctctccctgctgatcatgtccgattaatctcccaaacctcaatcccttacaaaacaacaactcctttccttcctaggcatggttagcgcagtcagaattcttacacaagagacaggaccacaccctgtagcctttctgtccaaacaacttgaccttactgttttagcctagccctcatgtctgcatgcagcggctgctgctgctttaatacttttagaggccctcaaaatcacaaactatgctcaactcactctctacagctctcataatttccaaaatctattttctgacccacacctgacgcatatactttctgctcccgggctccttcagctgtgcttactctttgttaagtcccacaattaccattgttcctggcccggacttcagtccggcctcccacattattcctgataccacacctgacccccatgactgcatctctctgatccacctgacgttcaccccatttccccacatttccttcttccctgtttctcaccctgatcacacttagtttattgatggcggttccaccaggcttaatcgccacacaccagcaaaggcaggctatgctatagtacaagccactagcccgcctcttagaacctctcatttcctttccattgtggaaatctatcctcaaagaaataacttctcagtgttccatctgctattctactactcctcagggattattcaggccccctcccttccctacacatcaagctcaaggatttgcccccacccaggactggcaaattagctttactcaacatgccccgagtaagataactaaaatgcctcttagtctaggtagacactttcactggataagcagagtcctttcctacagggtctgagaaggccaccacagtcatttcttcccttctgtcagacataattcttcagtttagccttcccacctcwatacagtctgataacagacgagcctttattagtcaaatcagccaagccttttttcaggctcttagtatccagtgacagactaatggtctattaaaaacacacctcacgaagctcagccaccaactcaaaaaggactggacaatacttttaccactttcgcttctcagaattcaggcctgtcctcagaatgctacaagrtacagcccatttaagctcctgtatagacgctcctttttattaggccccagtctccttccagacaccagaccaacttagactgtgcccccaaaaacctgtcatccctactatcttctgtctagtcatactcttattcagcgttctcaactactcatacatgccctgctcttgtttacactgccagtttacactgtttctccaagccatcacagctgatatctcctggtgctatccccaaaccgccactcttaactcttaaagtaaataaataatctttgctggcaaggctatgctgaaccttcttaggcactctctaatgagatgtcctaggtcctcccaattcttagtcctttaatacctgtttttctccttcttttattccatttagtttttcaattcatacaaaactgtatccaggccatcaccaataattctaaatgacaaatgtttcttctaacaatcccacaatatcaccccttaccacaaaatctcccttcagcttaatcgctcccactttaggttcccacgccgccccaatcccgcacgaagcagccctgagaaacatcgcccattatctctccataccctcatccaaaattttcatcatcccaacactttaccactatttcgttttatttttcttattaatataagacaggaatgtcaggcctctgagcccaagctaagccaccgtatcccctgtggcctgcacgtacacatccagatgacgggttcctgctttaactgatgacattccaccacaaaagaaatgaaaatggcctgttcctgccttaactgatgacattgtcttgtgaaattccttctcctggctcatcctggctcaaaggctcccctactgagcaccttgtgacccccactctgcccgccagagaacaactgccctttgactgtaattttcctttacctacccaaatcctataaaacggccccacccctatctccctttgctgactctcttcggactcagcccacctgcacccaggtgattaaaagctttattgctcacacaaagcctgtttggtggtctcttcacacggacgcgcatgaaaggaatagtattttccaagtacacatctaaactcctgaaattcttctgttcgacatgtttgccctttgaaatcatgtttttggagtatttcaagctaaacttaatatcaggtcctgcttctcatagttcaagtcgcttgatccctatcttttttttttttcttgagacggagccttgctctgttgcccagactagagggcagtggcaccatctcggctcactgcaatctctgcctcccaggttcaaatgattctcctgcctcagcctcctgagtagctgggattacaggcgcctgcaccgtgcccagctaatttttgtattttttagtagagacggggtttcaccatcttggccaggctggtctcaaactcctgacctcgtgatcagtggctcacacctgtaatcctagcattttggaaggccgaggcagacagatcacctgaggtcgggtgttcgagaccagcctgaccaacatggagaaaccctgtctctattaaaaatacaaaattagccaggcatggtggttgtgcgcctgtaatcccagctactcaggaagctgaggcaggagaatcgcttgaacccaagaggcagaggttgcagtgagctgagattaaaccattgtaatcccaggtacttgagaggctgaggcaggagaatcgcttgaacctgggaggtggaggttgcagtgagctgagatcttgccattgcactccagcctgggtgacagggcaagactctgtctcaagaaaaaaaaaaaagaaagaaaaaaataaaataaaatatttgtctagtaaatctaacatcttattaccacaggaaaaagatagtgattggtgatattatgtagctttatctaaatatctagttttgaaaaatttatttcccacttattcttttaaggcagtcaacaaaaatgtattgaatgcttactatgtgccagatattgctgaattttaaggaaaccttttgttcctttctcccatcaaccctttcatagatttctttttctggctgggtgcggtggctcacgcctgtaatcccagcactttgggaggcccaggagggcggatcacaaggtcaggagatcaagaccatcctggctaacacggtgaaactccgtctgtactaaaaaatacaaaaaattagccgggcgcagtggcgggcgcctgtagtcccagctactcaggaggctgaggcaggaaaacccgggaggcggagctggcagtgagctgagatcccgccactgcactccagcctgggcgacacagcgagactctgtctcatttaaaaaaaaaaaagatttctttttctgaaacagtttatactttacaggaagcacttccatctgttctactacttctcctcctctctcccatcccccaaaataataccatctaattcagaaaaatcagaaaaatggcttagtatagacaaggcagtgtctcagagaggaaatgatayggctaggactaagggagaaggaccctgtccttcaaagaagaaagagagatttctgtttctttgaaagatttaaagttacaagagtaagaaggatttaaagttagaagagtaagaaggataaagmataagaaacatctggatgaaagagggtccctgaaacttctcagttgcttgctgatttacatgccattaaactttttctgacaactgtaacccagcttatagtctttgaaaatgagtcatatttatcatcagtagcacatattagggactcagtcatatgttattaagtagcatttctttagtattttgttactggacttttcatatgtgaatatcttacgttctgaaatgtttcccttgaagtcaaagaaaacaccttcacatatggttcctatagtgtctaacatgctgaaggtttgcacagtcaggtttcttccaataaaaaacaagcaaactgtatacacatatacaaactatatacatatatgtgtataatattatatgtatatagtattatatatgtagtatatattatgtattatataatacattacataatacatatataatgtattatataatacacatatataatacattatatatgtattatgtaatacattatatatgtattatataatacactatatattatataatacattgtataatacattatatattgtattatataatacattatatatgtgttatatatacatatataatacacatatattatatatatgtgtcatatattatatatattatatatgatgtgtattatacatatataatacacatatatgtattatacatatataatacatatatgtgtattatataatacattatataatacacatattttgtattatataaattatataatacatatattatgtattatatatatgtatatatatacaagctgtcaggcctctgagcccaagctaagccatcatatcccctgtggcctgcacgtacacatccagatggccggttcctgccttaactgatgacattgtcttgtgaaattccttctcctggctcatcctggctcaaaagctcccctactgagcaccttgtgacccccactctgcccgccagagaacaacccctctttgactgtaattttcctttacctacccgaatcctataaaacgaccccaccccatctcccttcactgactctcttttcggactcagcccacctgcacccaggtgattaaaagctttattgcttacacaaatcccgtttggtggtctcttcacacggacgcacatgaaacaaactatatatgtgtatgtatatagtttgtatatatgtayatactttgcttgtttatttttttttgagatggagttttgctcttgttgcccaggctggagtagtggcacgatctcggctcactgcaacctctgcctcccaggttcaagcgattctcctgcctcagcctccctagtagctgggattacaggcatgtgctaccacacccggctaattttgtatttttttagtagagacggggtttctccatgttggtcaggctggtctcaaactcccaacctcaggtgatccgcccacctcggcctcccaaaagtgctgggattacaggtgtgagctactgcacccggcttgtttatatatattattttttaaatctctcagggtgtggggcagggcctgccccacaccctgagagatttataattggctcacatgattgtggaggctggcaagtccaatatctccagggcaggctggaccctatttccaaattaagtcacacttggagatcctaggagttaggacttcaacatataaattttgagggggatacaatttatcccatagcagtgttcaataaatatttgttggaaaaaaaaggtttttccccctaggtataatctgagcatgtgatctccatgtttcttttttccctctttgaactttcagttttctgtcatttctgactttaggaagccaaatgttggtttatgtgctgtctaagcatgggtggggttgggtagcacccttattttccctgatgcattcatatgcaaactttggtacattgcatattcacttgaatacatttgaaaaaggaacagagtgaagcctataattagtaagaaggagggaggagacagtggcaagcaaggagtggccccagcttctgcttgttctttcttttcttttccttagtgttgtgtcttggtttgattagccccatgctctctggaggtagaacctcaaatcaacagtcctgggtggaacagaaacaggctcttctcctctggcctcccttgcagtgaggagagcagaaaactgacttgctgagaatagcatcccttagcagacaggactaagctgtctcctgggaggttaccaagtaaagtgggctaatagtttttggaaagcccttcgtggaaaagcaaaatagtcaaagaagatgttcacagatgtaagaccaaagactacctgtgaaaaatagaaataatatggaaatgcgaaaataatacccttgagcagaatggtgtgaaacaaagtataaaatacacagaaatgagtgaggaaggctgggataatataaagacagaagacttccaaatacaccagaatgaaaacattttctttagctgtactgattggcagttatcatcactaattttttggcaygaataaattggaaatttatgtcagcacccttggataataattaaaaaatatatattataggccgggcgtggtgtctcacacctgtaatcccagcactttgggaggccgaggtggatgattacctgatgtcaggaattcgagaccagcctgaccaacatggtgaaaccctgtctctactaaaaatacaaaaaaaattagccgggggtggtgggggggcgcctgtaatcccagctacttgggaggctgaggcaggataatcacttgaacccaggaggcggaggttgtcgtgagctgagatcgtgccattgaactccagcctgagcaacaagagtgaaactctgtctcaaaaaacaaacaaacaaaaamtatatatatatatatatatatatatatatatatatatatrttatgcctaatatgtagcataacatgataatatataaktgatgtaattcttactccagaaatacttctattatttacaataaaggtccaagtgtaagaagcctkcgaagtaacatattatggtgtctatctaagctaaaagtctcaagtcaggattctgatacccagagcaaatccaagcacgctaacccctttacagaatagccttccacacggctccgtttcgcccatatgcaccacatgagatgtcaacagtagggttttatgcagcctaactttgggagattattaaaccctggacatttcctcccaccaaattccagacaggttatcagactgatagctgcatttaaatagattttaaaatggatcagaagagataaaaatcactggtgggccgatttgactgatggaagtggtaaagggmgtcagcagctctagctggaggggcactcaccatctacggaggagtgggtgttcacagacctgggcgattgctcttagcaggaagagtgatgggaaccaaggaaaacaagaccgcagtggctcatgccggtcatcccaacactttgggaggccatggtgaaaccctgtctctactaaaaatacaaaaattaccccagcrtggtggcgcgcacctgtaatccctgctactcaggaggctgaggcaggagaatctcttgaacctgggaggtggaagttgcagtgagctgagatcacgccaccgtactccagggtgggtgacagagcgagatcctgtctcaaaaaaaaaaagtttatggagtttatgtagagtggtagagtgacccaaaactcaattgaatatactggttttccctgtgtccaaatcaaacagagcctccagagaccatcacaattttacaacctaaccaagagacggtgcgtgcatgtatgtatgtgcctagtgtgtgtgaattaggggaaacatggagaaattgtttataattcttgaatctattctttgatgtgtttcattatttttggaaaattctcatttcttgtctcttcaaacatgtcttctgcttgttctttctcgtttctccttctaagattctgayaatatgtatgctaagccatttgatattgttttatagcacttgaagataattcaagtgctataaaaattcaaattatttgaaaagaattcaaatgattttcactcttttttcttgttgtgtttgtttgggtaatttctattgacctaacttcaaggcaatcgattatttcctcagctatattcgtattgtcaaggttattaatgagcctgaagaaggagctgctcatctctgatacagcattttctttttttttttttttttttttttgagacaggattttgttctgttgcccaggctggagtgtagtggtgcgatctcagcttgcttgcgaccttggcctcctgggctcaagtaattctcccacctcagcctcccaagtagctgggactacagatataagtcaccacacctagctaatgtctttatcttacatagacacaaagtctcctcactatgttacctaggctggtctcacactcctgggctcaagtgatctttttgccttggcctcccaaagtgctgggattaataggcttcagctactgttcctggcctgatattgcatatcttatttttgaaacttctataaagtctgtcatgtttagtatttcaggaagtcgatcacttccacctttcttttgaaatccacccctgacaccatctcctcatgtctgttgtccttttttttttttttcatgagctcctttgacatatgactcctgggcattttaaagtctctctcttttattataacatggagggcagctctgagcctggttccattgattactttgtatcttcacaggatgttgttgtcatcttcttcttcttttgatacaacttgtaatttttcattgattgccaaacatcttgtgtagaacaggagagatttaaataaatagtatttgtgactagaaatggacacacctcttctcaggcagttagcttggtggattgagttaatctagttaaaaggtgaactgtgcaggttttgtaattgccaagtttactttcggtacatcataggcttcaaattccttttgtgatgccttatgcttagggtggcatctggagtgctggctatttctcagtgtttgtgccccaccctcagctctcgttctcctctgtacaccacacagcagaccccacagaggtcgtctctctgcacgttcatgccctctgccagtggcggactgcttagttacttggtgctcttgctcgggtaatggtgaggggacagggtgcttctctgttgccctcttcatcttctatcttaggtaggtttatatgcctgggccctgggggatgagtatttctgccccactccttatgccaggctgccaaaccctgctttgaatttgtggctggtcttgggtgggaaagatttttttgtgctcctccttcagtttcaggagacctctaaaagtattagcttagaactctgggctcacaattgctccttgtccctccctcggactagggtcctccctgctcttcccttggtaacacctgtgccctgggagcaacagtatttgccagtcctccccagggtcttaaggctttcgagagaggagcatgggcagctggggccttttctgcaatgatagcaaatacggtccttgatgcccatagtactgagggggctctttgtagtctcccacttggcccccagtatttcctgtgaacacctggtagaggtcatggaaaggagcctgtgggtaagtaaagccctccttgcttctgtgacacccagaggctccttatagtcactctagtctgcactaggcctctagcaatttatgaaaaatgtagctgctttcttcttgcatgcttgtatgatggccyaaatacctcccatactctggcactgatgagacactccacccatctggtctctgctcatgaggattgcatgtccttgaatttcaggctacttagcttacctgcaacctcagctcagctgttttgttttcttttgttttgttttgtgatggagtcttgctctgtcactcaggctggagtgcaatggcgtgatctcagctcactgcaacctccacctcctgggttcaagcaattctcctgcctcagcctcccgagtagctgggattacaggcatgcaccaccatgcctggctaatttttttgtatttttagtaaagacagggtttcaccatattggccaggcgggtctcgaactcctgaccttgtgatctgcttgcctcagcctcccaaagtgctgggattacagacgtgagccaccgcccccggcccagctcagcatttaggttcaacttttggtttaagaaaagtgattttgcagtttgtctggctttttcatattgtcagagagggggcaatgcactttccagcttatttttattttttattcttagagacagggtcttgctctgttgcccaggctggagtgcagtggcacaatcatggctcactgcagacttgaagtcctgggctctagtgatcttcctgcctcagcctcccaagtagctgggcatgtgacaccacacctagctaacttttaatttttttttttggtagagatggggtcttactatactgcccaggttgatctcgaactcctggcctcaaacaaccctcccaccttgccttcccaaagtgttgagatcacaggctcgagccaccaagccacactctttctagcctttcaaattccaagttaaagtggaacttgccacatgtcgttttgtatcactttccccaacccctttcttttcttttttttttttttttttgagacggaatttcrctcttgttgcccaggctggagtgcaatgttatgctctcagctcactgcagcctccacctccccagttcaagtgattttcctgcctcagcctcccgagtagctgagattataggcgcccaccaccatgcctggctaatttttgtatttttggkagagacagggtttcgccatgttgactaggctggtctcgagctcctacggatcggcctcccaaagtgctgggattacaggtgtgagccgctgcaccagccccaacccctttcaattagcattgcaaataattccccttatcatgaaaacattatttttaatggcagcagagtattgctttatattaacatgacagtttattcaaccgaactctttatggggcattgyaatagacttaatgttttatgtttgcagctctttacaccaacacttttcctactgtagtgatttctttgaacaatttcccctccccaactccctgtggttctaaaggggtggccaatcacagtaccccatcaccctggcctttaggtgggagaatgacccaggccctgcctatcataccctcctgactacagtgactgattcagaggtgagccagcgagagagggaggaacacagtccttcttcgggaatttctataacataggtgaaaaattttgtcagttggggtcgtggagctgaacgaatatggcttgagggctcccagctgccgtcctccctacgacttgaagaaaagcttgtgtgcagtaggagaaaatgaaccaatcagagacaagtacacaagagagaaggactgggaggagtcggccctggctgcaccacgtctccactcctgggctgtcaagtttttcaaggtgctctggttccataagctcattcttcctgttggatccattccagttaccaaaaacacttttttgtttaggctggtttgatataggatgatcattggtcccagagagcatcctggctaatctattttattattttattttatgagacaagttctcactgttgcccaggctggagtgcagtggtgctatcatggctcattgcagccttgaacccctgggctcaagcaaatcctaccatctcagcctccagagtagctgggactacaggcgtgcaccaccacactcagctaattttaaagaaatgttttatacagactgaaactgcctttgcaaaattgtaacaggaaattatgacagtgcaagaagtcagacctaaccgactctatcttgcttctaacccttaagctgtccttgtttattcctgggcataggccgaagtaactttgggaaggaattcagttcatggtttgactctgaaacaaaattgataacagccctttcccaaaaagacccccttcttgcccggggtccagtctgcctttgtaggactaacagattagctacaagattagaaattacagtttagaggccgggtgcagtggctcgcgcctgtaatcccagcactttgggaggccaaggcgggcggatcacgaggtcaggagatcgagaccatcctggctgacacggtgaaaccccgtctctactaaaaatacaaaaaattagccgggcgtggtggcgggcgcctgtagtcccagctactcgggaggctgaggcaggagaatggcgtgaacccgggaggcggagcttgcagtgagccgagatcgcgccattgcactycagcctgggcggtagagccagactctgtctcaaaaaaaaaaaaaaagaaattacagtttagaggtcatgcagcctctggctccaagagtctgaacctccccaaattgctcctggggataacatcactgctgtaaaacctaagatcagtaattgagttattttgcaggccctgcactccatgggatcagctgacaccacacagaccagtcatctggcccaaccagttctgccatctcacccaggaacagaagacattaagaaaatctaacttcgaccctctatgattccatctccaacctgagcaatcagcactccccacttcccaagcccctacctgccaaattatctttaaaaactctgatccacgaaggctcaaggatttaagtaataataaaactccagtctcccrcacagccggctctgcgtgaattactcttttgccattgcagttcccctgtcttgataaatcggctctgtctaggcagcaagcaaggtgaatccattgggtggttacaaaacggggtctcactatgttgcccaggctggtctcaaactcttgggctcaagcaatcctccagcttctgactcccaaaagctgggattataggcatgagccactgcacttagactaatttatattttaggtgacttctaagtattaccatcataaagaacactgtgggctgggcacggtggctcatacctgtaatcccagcactttgggaggctgaggtggtccctggagctcaggagttcgagactagcctgggcaacatggtgaaaccctgtctctattaaaaatacaaaacaattagccaggagtgttggtgcctacctgtggtcccagctactcaggaggtggaggtgggaggatcgcttgagcccaggaggtcaaagctgcagtgggctgagattgtgccactgcactccagcctgggtgataaagtgagactctacttcaaaaaaataaaaaataaagaaaagaaaaaaaagaaagaacagtgtgaaaaaactcagtgttacacttgtgcatacatgcatgctgtcctttttttcctcattaagaaacatttccagagtaggagttgctgagtgaaagaatatgcaaatctcaaaggctttggtgtgtattacaaaattgccatgagaaagttatccacattctattttctctaggactgtgtgtgtccctatttccatacagtcacaacaatactgagtagtattaattttttttttttttttgagacagagtctcgttgtgtcacccacgctggagtaaagtggcatgatctcggctcactgcaacctccacctcccgggttcaagcgattctcctgcctcagcctcccaagtagctgggactataggcacccaccactatgcccagctgatttttttttctttgtatttttagtagagacagggtttcactatgttggccaggctggtcttgaactcctgacctggtgatctgcccacctcaaccccccaaagtgctgggattacaggcgtgagccactgtgaccggccaagtttaccgcttttctattgaaactgttctcatacccgtgttcccaactacaccttaattgaataataaaagaaaataaggacattaaatgagaacaggaattggaatgagaccagaaaaaaagggaggagttcaaaatatgttctgagagctttaccattatgaatactcagctctggttttccyccaaaactggctgaaccagtatggatgttccaggcagaaacaactttaaagaagtgaatagtggccctaccctggtccaccacctaacctggtggttacagaaggaggaacacagtcctcctgtgttccaggtgccaggaggtgactgactatagcatcagtcatcactgcacaccctacctggaattagtatataaagctacgcggagcgatctctgcccctgaccctggaaaaatctgtctcacccacaaagatgtgggctcagctccttctaggaatgttggccctatcaccagccattgcagaagaacttccgtgagtgcttggtgtcagaattggtttattagggcagcggcttcttcgcctaactttctcaaacatttatatggagatggggagatcaactttggtttatcttaatttcctcctccttttttctcttctttggttccactgatcctttacccagagagggaggctgacgcatgaagaggaagctttaaaaaagataaatattaaaatgtgccctgttttctgaaataggcctaatttcctccttggtgctctaggcatgtgtgctcggtgagggcctcctgatggcggaagttgargactgtgcactgagtcgttgcccctctgcttcttgtagaaaatgaggtgcataaggaaggcaggggcttggtctgtctaattcactgctacttgctgagcgcttaggagagtgctggatttttcgagtgaatgaatcattattgccctgaaatccttctgctcctttaatagaaactacctggtgacattaccagcccggctaaatttcccctccgttcagaaggtttgtttggacctgagccctgggtacagtgatgttaaattcacggttactctggagaccaaggacaagacycagaagttgctagaatactctggactgaagaagaggcacttacattgtatctcctttcttgtaagcacagactcagccctcactcgaatcccttacttgcctattctcctccctaggctcactataatctactttaagtataatttctgttatcttttgccacggcctctaaacctattttttctcaacttaacctcaatccccggctataactcacccacggtttcctcgacctaggatttctccctttagttcctgaccttaattcttcctcgtggtaatttgttttatgtctctatccttgctacccccatctaactcagctctttcctttaactcactgttgggttgagaccagttgattctgttcccccaatcccttacccctccccagaagtcccctttcttggtcaggtaccacctcctgctggtggcacagaagaagtggccacaatccgggtgtcgggagttggaaataacatcagctttgaggagaagaaaaaggttctaattcagaggcaggggaacggcacctttgtacagactgacaaacctctctacaccccagggcagcaaggtaagagtcacatatttggggttcgactaaaacctggggaaaccgctgtgcacaggggtaaagaggggatttgtggtttgacagtaggctttggaaaaaaaggagtgcagaggagaggaaaatctggggggattaagtagtgcaagtgttgaatacatgctgcgctacacaagcaagagaagtaggtgggggttgctactgagtttgtgtatctaaaacaaaagtacacatttcttctggaatagaatttggcaagtataactgggttgctgggccttacaacaaactgcttgtaaatggctaagaaagcactgagggcatttggcttgagctactggggttttttttttttttttttttttttttggatttgttcattcgtccttacaggggcacttcattctgagatttcaaagtcaggcaccctgaaaagaaactatgtttgggttttttttatttttttatttaaaatttttgtgggtacatagctggtgtatatatatttatggggtagatgagatatttttatacacacacacaatgtgtaatcattacatcagggtacatgtgtatccatcacytcaagcatttatcatttccttgtattacaaacaatccaattatactctcttagtaatttttaaatgtgcaataaattattgttgactgtagtcactctttgtgctaaaaactacaagatccctagatcttattcattctagctaaatatatttttgtacccattaaccattcccaccccacccctcatcctgcccaccattacccttcccagcatctggtaaccatcattctgttctctctctctctttcaaaaaaatttttttccttttaccttatttttttccacacacttaaaaattattattctattctctatctccacgacttcaattgttttaatttttagctcccacaaataaatgagaacatggaaagtttgtctttctgtgtctggtttattttacttaacataatgacctcctgttccattcaggctgttgcaaaggatggggtctcattcttttttatggctgaatagtactccattatgtatgtgtaccacattttttaatccattttttatcatctgttcatagacacttaggttgcttccatatcttggctattgtgaatactgatgccataaacatggcagcacagatagtctttgatatactgatttcctttcttttgtatatatacttagcagtgggcttgcaggattatatggaagctctatttttagtttttttcagaaacctccaaactgttctccatagtggttgtactaatttacattcccaccaacagtgtatgagggttctcttttctccrcatcctcaccagcatttattattgtttgtcttttggaaaaaagccattttaactggggtgagataatatctcattgtagttttgatttacatttctctgacagtcaatgatttgagcaccttttttatatacctgtttgccatttgtatgtcttcttttgagaaatgtctattcagatctttttgcccgttctttaatctgattactagatgttttcctatacagctgtctgagctccttatatattctggttattaatcccttgtcagatgggtagtttgcaaatattttctttcattctgtgggttgtctctttgttgattgtttcctttgctgtgcagaagctttttaacttgatgtgatcctgtttgtccatttttgctttggtttcttgtgctccttgggtattactcaagaaatctttgcccagaccaatgttctggagagtttccccaaagttttcttatatataatagtttcatagattgaggtattagatttaaatctttcatccattttgacttgatttttctatatggagagagatgagggtctagtttcattcttctgcatatggatatccaattttcccagaaccatttattgaagagcctgtgctttctccagtgtatacacttgtcacctttgtcaaaaatgagttcaccctagacatgtttctgggttctctattctgttccattggtctatgtatttgtttttatgacagtaccatgctgttttggttactatagctttgcagtataatttgaagtcatgtaatgtgattcttccagctttgttctttttgttcagaatagatttggctattttaggtcttttatggttccataaaaattttatgattttttttacaaaagtcctaagatttaggatgtagaatttctgtgaagaatgtcattagtattctgatagggattgcaatgaacctgtagattgccttaggtagtacggaattttaacaatatcaattcttccaatccagaaacatgaaatctcttttcatgtttttgtgtgtcctcttcaatttctttcatcagtattttatagtttttattgttgagatctttcacttctttggtaaagtttattcctaggtattttatattatttatagctattgtaaatggaattatctttcttaatttctttttcagattgttccctgttggcatatagaaatgttactgaattttttttgtttttgagacagagtctccctctgttgcccaggctgtggagtgcagtggcgggatcactgcttactgcaacctctgcctcctgggttcaagtgattcttgtgcttcagcatcccaagtagctgggagtacaggcatgcgccaccatgcccagctaatttttgtttttgtttttttgttttttgagatggagtctcattctgccgcgcaggctggaatgcaataaatggttgctcattgcagcctctgcctcctgggttcaagtgattctcctgcctcagcctcccgagtagctgggtttacaggtgagcgccaccacccctggctaatttttgtatttttggtagagatggagtttcgccatgttggccaggctggtctccaactcctgacctcaagttatcctccccactcagcctcccaaagtgctggggttacacgcgtaagccaccacgtctgtcttcttgcacttttaggattcttttttgttttttattccttgatgtttgggagtttgattattaaatgtcttgaggtagactcatttgggctaaatctgcttggtgttctataatcttgtaattaatattgatatctttctcagctgggctcagtggctcatgcttgtaatcccagcactttgggaggctgaggtgggcaaatcacctgagatgagtatttcgagaccagcctggccaacatggcaaaaccctgtctctactaaaaataccaaattagccaagcaaggtggcctgtgcctgtaatcccagctactggggaggctgaggcaggagaatcacttgaaccagggaggcggaggtcacatgagccaagatcacattactgcactccagcctgggcaacagagcgagactgtctcaaataataataatattgatatctttctctaggtttggaaagttctctgttattttcactttgaataaactttccatctcattttctctctcaacctcctctttaaagtcaatacctctttttttttctctttgttaaatttatctgataagattctgmattctttctctgtgttatctaaaattttgttgagtttcctcaaaacagctattttgaattctcgatctgaaagatcactatctttgtttctgggagattggttgctggtgccttatttagttcatctggtgaggtaattttttccaacatggtcttgatgtggatgttcattggtgtctgggcattgaagagttaggtatttattgtagtcttggcattctggacttgtttgtacctgtcctccttgggcagactttccaggtatttgaagggacttgggtgtcgtaatctaagtgtttggactctgcagttcatctgcattagggaggaccccatgctcagtatctctgtggctcttgaagcctcatagaggtacctccttgatggtcttggataagatctggaagaattccagattaccaggaggagactcctgttctcttcccttactttctccaaaacaaacagagtttctctctttgtgctgagctgcctggagagaggggtgacacaagcacccctgtggccaccagcattgggactgcactgggtcagatctgaagccagcaccgtactgtgtctcacccaaggcctgtggtaaccagtacctggctactgcccatgtttgctcaaggccctagggctctacagtcagcaggtgacaaagccagccaggcttgtgtcctccccttcagggtggtgagttccccatgaccctggaaggtccagagatgtaatctgcgagccagggcctggagtcagaaaccttaggaatctacctggtgttctgttctactgcagctgagttggcacccaagccataagacaaagtccttcccactcttccttccccttttcacagaggagtctctctctgtggccaccactactccaggcccagaggagtactgcctggatacttccagtattctctcgaggcccaaagtctcctttcaccagcttgtggtgaatggtgcctggcctgggactctcttttcagggcagtgagctctcctctgacaaacagcaggtccagaaatggcatccaagagccacagcccataactggggaccccaagggcctgcttggtgctgtaccccactgtggctgagctggtacctaagctgcaagacaaagtccccttgactcttccctctccttttctcaagtagaaggagtctctccccatagtcaccacagctgggaatgtgctgaatcactggaagccagcatgtctctgagtctcacccaaggcccacgacaagtactgcccagctatcactgctgagtatttagagccccaggggctaatcggaactcagcttccaaccgctgggatgggcagttcacccctggctaacgctggtctaaatgctccctccatgggcactggctgagttctgccctgtgtgctttcccctgtgattgggcagcaytgcrttctaaagccaagtcccacagtcactgtgctctcccgccctcaagctcatcgattctgtctctgtaccacagtcactgctgggggatggcggggagggggtgaatcagcaattsaagtgtgtcttttctaccctcttcagtgcctctttcagtgatataaagttaaaaccaggcactgtgatcactcttctgatttttggttcttatgacagtgctgttttgcgtgggcagttgttcagtttggtgttactgtgggggatgaggagggtggtcaatggaggcttctattctgcctcttgctctgcctcctgagctccaggcctgygtttggactttaccttactctcagagcaggttttgtaaaaaagtaaaacctgttggggttttgctgactcagmgcatgtgtgaggaaggaggagggatagaggaaagattctgagcaggaggcsgagcgcggtggctcacgcctataatcccagcactttgggaggscaaggcaggtggatcacctgaggtcaggagttcatagaccagcctggccaacatggtgaaaccctgtctctacaaaaattagccaagtgtggtggcacctgcctgtggtcccagctactccggaggctggggtgggagaatcacttgagcccaggagtttgaggctgaagtgagccacggttgtgccactgcactccaacctgggtgacagagtgagaccctgtatcaaaaaaaaaaaaaaaaaaaaaattctgagccaggaaacatcccctttgctaatgatgcctgttcctttccagtgtatttccgcattgtcaccatggatagcaacttcgttccagtgaatgacaaggtgagttgggaggaggaraaggagtggcgcagggagaacagggaaaaggatgagagattctctagggtggaagtcctctcagcctgggcgtggcaaggcgaggccctctgggttggagactgctgtgtgcgtgggactggaagtgctgggcgagcttcagggagctagcctaaatcagcctaggaacaagcagaggtaaccagttctcagcttcagtatctacacattcatcaggttcttgagagatggttatgctccttgtcattttattttatttatttgtttatttagagacagagtctcgctctgtggcccaggctggagtgcaatggtgtgacctcagctcactacaacctctgcctcctgggtttaagcaattctcctgcctcggcctcccaaatagttggaattacaggcgcgcaccatcacgcctggctaatttttgtatttttagtaaaaacagggttacatcatgttggccaagctggtctcaaactcctgacctcaagtgttccacccacctcggcctcccaaagtgctgggattacagacaagagccaccatgctcagccccctttcattttaagagttttcgcaaacttcaagaccttttcttcaggactgacaaaagcattttttttttaaggcagaaaggagaatgtccgcttccactctgtttctatgaggcaaaataatttacaaagtaggtaattctcttagggcaacattaaataaatacatgccaaagcttaaaatgtagcaacattttgcgaatatttgatttttccttggactccccatccctagaatcataagccttaccacaggtttgatttcaagttggagcatgtgtcatttctacatgcttctgagacacttacctcccggacacccctgctttcttcctcttccgtctgtcccagcctgtgtattcaaatgaaacttttagagataaacatagagaaagcatgatttccattttccatctccgtgttctcagagctgctgtttcctttccctatgtgcaggggagttattagcttgttatgattggtaatgccctacccgctactctctttcccaatatagatttccttttacttcctccttcccatcacctatggcttttctttggtaggtataacgttgagtacttcttactttttttttttttttttaacattttaagacaaggtctcattctgtcacctaggctggagtgcagtggcagtcatggctcactgcagctttgaccctgccccgggctcaagtaatcttcccatctcagtctccccagtagctgggaccacaggtgtgcactaccacacctggctaattattttatttttttgtagagttgtggggggcgggggtctcaccttgttgcgcaggccggtcttgagatcctggcctctctcgctttggtctcccaaagtgttgggattataggcctgagccactgcacccggcctgagtgcttacttcttaacagactgttttctctagagctgcaacaaggaagtgctgggttcaaagcgtggcccgcagcagcactattttagactcacttaccctcagggttgatctcattaactacccctgttacgattcaaatgaagcgggattacttccaggtgttctgttttctgcagttaggctctttctcttgtgaaattactccttcctccccactctatttctccagccaaactctccctccaaattcagttgaaacactgagattaacaaaaggaattttaccaagaaagctaggataaaaattgtgtttatgtaaccacccaatgggttcaccttgcctgctgcttagacagggttgatttatcgagacaggggaattgcaatgaagaaagagtaactcacccagagccggctgtgtgggagactggagttttactgttactcaaatcagtctccctgagcatttggaaatcgagtttttttttgtttttgtttttgtttttttttgagacggagtttcattcttgttgcccaggctggagtgcaatggcgcgatctcggctcgccgcaacctctgcctcccaggttcaagtgattctcctgcctcagcctcccaagtagctgggattacaggcatgcgccaacacgcccggctaattttggtacttttagtagagacggggtttcttcatgttggtcaggctgttcttgaactcccgacctcaagtgatccgcccgcctcggcctcccaaagtgctgggattacaggcgtgagccaccgcgcctggccaggaaatcgagtttttaaagataatttggcaggtaggggcttgggaagtggggagtgctgattggtcaggttggagatggagtcatagatggtcaaagtgaggttttcttgctgttttcctcctcctgggtgggatggcagaactggttgagccagattactggtctgggtggtgtcagctgatccactgaatgcagggtctgcagaacatctcaggcgctgatcttgggttttacaacagtgatgttctccccaggagcaatttgaagaggttcagactcttggagtcagaggctgcatgacccctaaagtgtaatttctaatcttgtagctaatttgttagtcctgcaaaggcagactggtccccgggcaagaagggggtctttttgggaaagggctgttatcaattttgtttcagagtcaaaccatgaactgaattccttcccaaagttagtctggcttacacccaggaatccacaaggacagcttacaagttagaagcaagatggagtcggttaggtctgacatctttcactttcatagtttcctcagttataattttgcaaaggcggcttcagtccctccctttgggttttataacaccttaatcttcaggtgtgggctaggaagatgggaaaaggctgtcgattgttctggcttcttcctgctgagagggggcgtagtgagggtacctaaggtgagaggagtggaactgcttagaagcaagatagcgttggttaggtctgatttctttcactgtcatcgtttcctcagttttaattttgcaaagtcagtttcatttacacagcacaatatttaatccccaaacaagtaaagtaagcctgatattaactgaccctgtctaacttgattgctatactcagttattcagaaactccaggcaacttccagtcggaaatgctactttccttttttttttttttttttgagacggagtttcgctgcgttgcccaggttggagtgcagtagcgggatctcagctcactgcaacctccccctcctgggttcaaaggattctcccgcctcagcctcccgagtagttgggtttacaggaatgtaccaccacatctggctaattttgtatttttagtagaaatgtggttttaccatgttggtcaggctggtctcaaactcctgacctcaggtgatctgcccacctcagcctcccaaagtgctgggattatgggcgtgagccaccatgcctggcctcagcaatgctactttcctagtgaaacacttattttcttccagagcctatttctggccaactgatgtctttcctgattcttgatccctgtgtgagaaaagtactttgttatcgaagtgttttttgttgttgttgttttgtattttgtttttgagttactttgtcacccaggctggagtgcagtggcatgatcccggctcaagcaacctccgctgtccgggttcaagtgattcttctgcctcagcctccggagtagctggggttacaggcatgtgccaccatgtccggctaatttttgtatttttagtagagaggggtttcaccatgttggccaggctggtcttgaactcctaacctcaggtgatccaaccgccgcagcctcccaaagtgctgggattacaggtgtgagccaccgtgtctggcctaaagaagtgtttgtttgttttgttttgttttgactttatggaaatttatagcaatcttagtgatattctcctcctgatgtttatatrgcccaggtttgtggaagtcctagctcatcgtgatccttagatctccttattttttgctttttttgaagaattgccattatccctactatcaaggctgatatttgtatttagtggttcagcttcttcactggttggcatcacatgacacttggcccaagaataaaaaaatcaagcactgtcttgatttcattttcttctttccaagttagatccaaactggtcttctcttttgaatacctttgcagtctctctgagcccctctcctgctattcactgaattccagctttcaatctcatctagttgcaagcacaatgacctgttcctcacaaacttaatggtttcacatctatttagcaactactgtcttgaggaaagtgatacatgattctccaatggaactatttcaaacaattttaaaaataattatttgcaatgcttgaaagtaagcttcctgcccacaagcattcagatggtaaaggaagaagccaggagatggttggctaccaagaagaggtttaaacattgaggaaccccctggtgctaatacttcttttagggcatgtttcttgtgcaagagctcagtcacagggtactgagactggtctgacgctccagttcttcaaatcttttggagactggcaattcctttgagattcctgcccccactcttaccctcctcctgccttgtttccctcccaagaagtctgtgcccccattgttattcttttcagggcacaaaagagccatttagaaaggaagaaatgaagaaatgggcaagagggaaaggaagaattctttgtgaacttttgctttcagcaaacttattcttattgctgtcaaccttctttaacccgcattatctggttttscttttcagtactccatggtggaactacaggtaagcggaagtttctttctcttctctgtcagttgtggaagaggaagaatgagaatttggtggtacaccttgaagacagaagcaactctgagatcttggcccagagccccatgactctgcccagcaccgagcgcccacatccacctaagctgtgcctgctttcttgcctctgccctcctagtctctcacacctacatttcagtagacaaggacaccagcctctgtaatgactacaccgctctctcattcccctaacttctctgtgcccagaygacttaaccaggcttggttccatactccccttagtgtaaggtaatagcccttgccataggcattctcaacaggtacgtgataacataaacacctgtgagaagtattttaaaggaaaggctctagaaggtgatttctccacaatatcttctccatttttccattaaatcacccatgttttaggtatcttacaatcaatctcctcagccttgtcccctaatagtgaccagaaacagagtaaacattctttgtaaatgacatcctgggtcctactttctaaaactggagataacactttagagggctcagtctgatcattaaaatccacaagatttcctaccaaatgggggctggatctatagaaatatttacctcattccgccataaagaaagttataaataacacagggagctgctcttcctggacacagaccacaggggtcatgaacaatgggtggggttttttacctgccttttgcttctttacctgctttttgcaatgcagagtgggaagcaaacgggcaggcacatcatgcagtttctctattggacaggatccaaatagcaacaggattgcacagtggctggaagtggtacctgagcaaggcattgtagacctgtccttccaactggcaccagaggcaatgctgggcacctacaytgtggcagtggctgagggcaagacctttsgtactttcagtgtggaggaatatggtaggkggggaaatggacaggccaaagtattgggcataatctcatcttaaaatcagcaaaggtggagccgggcgcagtggctcacgcctgtaatcccaggactttgggaggccgaggcgggcagatcatgaggtcaggagmtcgagaccaccctggctaacacagtgaaaccctgtctccactaacaawacaaaaaattagccgggcrtggtggcaggtgcctgtagtctcagctactcgggaggctgaggcaggagaatggcgtgaacctgggaggtgsagcttgcagtgagctgacatcacgccactgcactccagcctgggtgacagagcaagactccgtctcaaaaaaaaaaaaaaaaaaaaaatcagcaaaggtggagtaaaatgtactctgggaaaggattatttactcatttttgaatcgatgctgaaccagctaattacttcaggaacatgctacctaaataatgcctccttcattagatccattaatttaattctcactgtttatrcccctctgctcactgcctgtctgactgattcctcctccagtgctttctccatttctccttttactctcttcagtgctgccgaagtttaaggtggaagtggtggaacccaaggagttatcaacggtgcaggaatctttcttagtaaaaatttgttgtaggtaagagcagaagcttgggatctggtggagattaaagatgcatcgagagacatgatgaggggatgacatgggatgtgggattatgggtgggccaaaacttggggcattttatgtaattcagagtcatggcttatccaagacctttttttttttttttttttgagacaaagtctcactcttgtttcccaggctggagtgcaatcacgtgatctcggctcactgcaacctccgcctcatgggttcaagcgattctcctgcctcaacctctagagtagctgggatcacaggcgcgcgccaccatgcctggctaatgtttgtatttttagtagagatggggtttcgccgtgttggccaggctggtctcggactcctgacctcaggtgatccgcccaccttggcctcccaaagtgttggattacagacgtgagccaccgcgcccagccaagaacatattttatagttgtgtttctgctgtttttttccattgctcactcagatagtattattgatttagtctttacaagacacaatattgaatcccatagataaatatggatcaggagaaagaaagatrctgtttccgtccttagtatggtgctaattgtggaaktgggtctactctaagactctgagtaaagtagggaaggggaagagagctagagaaaggtaggattgtcagagcttgctttcttcttttttttgagacagagtctctgtcacgcaggctggggtgcagtggggagatctcagctcactgcaacctctgtctcccaggttcaagcgattctcctgcctcttcctcccggagaagctgggattacaggtgtgagccaccatgcccagcaaatttttgtatttttagtagagacaggatcttgccatgttgcctaggctggtcttgaacccctggcctcaagtaatacacctgtctcggcctcccaaagtgctgggattacaggcgtgagccactgcactggcccrgattgtcagagctttctttcagaggctggagtgtgagagggaagaagtggtgtttgagggaagagttggatctcaagtggaatttcccaactctgactccttatgcttttcttggttaggtacacctatggaaagcccatgctaggggcagtgcaggtatctgtgtgtcagaaggcaaatacttactggtatcgagaggtggaacgggaacagcttcctgacaaatgcaggaacctctctggacaggtgagtaaatgacaggttaaaaaggaacctatcggccaggcacggtggctcacgcctgtcatccyagcactttgggaggccgagatgggcggatcacgaggtcaggagtttgagaccagcctgaccaatatggggaaaccccgtctctattaaaaattcaaaaaattggctgggcatggtggtgtgcacctgaaatcccagctacttggaggctgagacaggagaatcacttgaacycgggaggcggaggttgcaatgagccgagatggtgccactgcactccagcgtgggtgacagagcaacactcagtccccctcccccaccgaaaaaaaaaaaaaaaagaacgtatccacatgtcctaaagcgtaaggaagcaacaatctagaaaagagctaaacagcccaaagtagaaagcatttcccagaattatcatcccagttccaaagaacaaagcagggatctttatcctaaacagggagtgttttagagtctgccttggaaccaagaaattgacctaaaccccagtaaggtacaattttccagttttgaaggcatttctttttccctttcccaaatcttggagcttcaaagtcatttcatgattatctatgtgcaagtgtatacttcatgttgtaggagagtttttctrtattagaaactgaagtgtggagatgagaaattatttccttctacagaacattataaaatggatgtagagattagattcctcatctgctctctatctctgtctctgatcacctcactagactgacaaaacaggatgtttctcagcacctgtggacatggccacctttgacctcattggatatgcgtacagccatcaaatcaatattgtggctactgttgtggaggaagggwcaggtaagtagggtgctccttggctcattaagaaaagagaaagaaaaagggctggtcccagggacagatttactccaagtatacaagacctaccctcttgagtgtttggatggtaccttgttcctagttcatagtcaaggggaaataccagatcccatcttgccatctataagaaatactacgggccgggcatggtggctcatgcctgtaatgccagcactttgggaggccgagacgggcagatcacgaggtcaggagatcgagaccatcctggctaacacggtgaaaccctgtctctactaaaaatacaaaaaattagccgggcatggtgacgggggcgcctgtagtcccagctactcggggaggctgaggcaggagaatggcgtgaacccaggaggtggagcttgcagtgagccgagatcgtgccactgcactccagcctgggcaacagagcgagactccatcttaaaaaaaaaaaaaaaaaaaaaagaagaaatactacatacttctccaaaagattggggaggtgaggttggtttggatctttggccagaaatacattcaacttcatccctctgccaccattctctcagagacttgacattaaacgtgaagatgagaatatcaggtgcctagatctttatacatctggtttccctctgcaggtgtggaggccaatgccactcagaatatctacatttctccacaaatgggatcaatgacctttgaagacaccagcaatttttaccatccaaatttccccttcagtgggaaggtatgttaaaacttttctctgcatagacaaaaaaatgcataaccatctactttgcctccttcctgcagccatagccacatagctaacttagtgctgttccaagtactttatgtgtattcattttaatctttagaataatgcaatgaggcagacactgtattggccccattttatggatamtgagacaggcaacagaggctaagtgatttttccaaggtgatcacaaatagatgggaactatgaccaaatccaggaagcctgcctcccgggtatacactctccactccctgtactctgctgcccctaatcccatagaagtgccttgaatattaatgacaccttaggggtctttctaatgccaggggctgatcttctaatgtctaaatcttcatatttaagagctgcagggtttctagagaaatcatccagcctggtctcctgcatctaggcaaggttaatatgaaactttccttgacagccatgtatagctctgtaagcaattttgtttttctttctgtttttgttttgttttgttttgttttgagacagtctcgctcttgttgcccagcctgaagtgcaatggcgcgatctctgttcaccgcaacctccacctcccaggttcaagcgattctcctgtctcagcctcctgagtagctgggattacagacatgtgtccccatgcctggctaattttgtatttttagtagagatggggtttctccatgttggtcaggctggtcttgaactcccgacctcaggtgatccgtccacctgggcctcccaaagtgctgggattacaggagtgagccactgtgcctgactagcaattttctttagagattttaaaatttccggcagggcgtggtggctcacgtctgcagtcctagcactttgggaggctgaggtgggcagatcacttgaggccaagagttcgagaccagcctggccaacatggcgaaaacttgtctctgctaaaaatacaaaaattagccaggcatggtggcgcatgcctataatcccagctactcgggagtctgaggcacgagagtggcttgaacacaggaggcagggggtgcagtgagctaagatcatgccactgcactccagcctgggcgatagagcgagactgtctcaaaaaaaaaaaaaaagataaatacataattaaattttctttgctagtgttttctttctgatatctaactgaatttctctcttgttcagcttatctttctttacttcttgtacagctggtccacacaataatattgcacacatagagatgcatttattcctcagttatcatttctctagaccaagggtgggtgcaaattatttttagagcctaaggattacacartttgggagggtaggggattcgctttaagaaaaagaaagcaaaataggctgggcacaatggctcatgcctgtaatctcagcactttgggaggctgaggcgggcgaatcacgaggtcaggagttcgaaaccagcctgaccaacatggtgaaaacccgtccctgctaaaaatacaaaaattagccaggtatggtggcacgggcctatagtcccactacttgggaggctgaggcaggagaatcgcttgaacccaggaggtagaggttgcagtgagctgagctcgtcccactgcactccagcctgggcgacagactgagactccatctcaaaaaaaaaaagaaagaaaggaaggaagaaaggaaggaaagaaggaaggaaggaaggaaagaaggaaggaaagaaggaaggaaggaaggaaggaaggaaggaaggaaggamggaacggaaggaaggaaggaaagaaaaaagaaagcaaaacaacgtgcagaacctttgaaggagcctgtgcatatgaagagccctgaagcttcattagccaccgggcaaatctagctctgctctgggctgttacttctgtttgtttttcggttcctcacagatcctagttcaaaagcttgaatcacatttatctttttcaggactctttcctgaaatgtattcttagaaattctgttattacttttagtgccaaaaaccacaattagtttgcaccaacctaatatttcactttacctcatactcaagcttactccaaacctaattctaatccgtaatgatctttgtccttcagataagagttaggggccatgaygactcctycctcaagaaccatctagtgtttctggtgatttatggcacaaatggaaccttcaaccagaccctggttactgataacaatggcctagctccctttaccttggagacatccggttggaatgggacagacgtttctctggaggtaagcatggacggaggaccagcttcctagaaaggaaggcttccctgaaggaaaacttcagaattttcctgtttcctatyctcccctctgcttggaattacatctttctcactcacaagtcctgctctcccgttgacaaaaagttttccttagatgctttctgtttttaatatcaatcaaataaatagtccttacttggatgaaaactactatttctactaatacatcttttaacttacccccatctctatctgatcctatctatatatgaagttagagcagggaggaataggtgactcagagtctttttctttctctttccccttcccatcccctcattacttaataaaaacagcaaacaagagaactctagattctagataacttataagtatcaattatcaactgccacaacaatgcttcttatcaaacagctacaaacttcagtatcgtgcagcagaaagcattcactgcttgtgcatctggggcattcagtcaggcagctctgctgatttcgatttccagaactgtctgcagatcggctggccataagctgctgctccgcatgcctctcatgcaggagccrgctagcccaggtatattcttatggcagtgatgaggtgcaagtgcaaaagctgatgttcagggcttttcyaaacctctgtatattgcatatgtttttttcttttttttttttttgagacagagtctcactctgtcacccaggctggagtgcagtggcgtgatctcggctcactgcaagctccgcctccccggttcacgccattctcctgcctcagcctccccgagtagctgggactacaggcgcctgccaccacgcccggctaattttttgtattttttagtagagatggggtttcactgtgttrgccaggatggtctcgayctcctgacctcgtgatccgcccgccttggcctcccaaagtgctgggattacaggcgtgagccaccgcgcccggcccctgttgcatatgttaacaccccwttcccaacaaatcgaacagtgggcacagactaggagggtactggaagaccacatgctcaaggatgctgatctyggagggggcrgggtgcgtgtgaggaattggagccattaatgagatcgttcaacctcaggacttaagcaaacacatactacttgccttgtggctaatttgactatttctttactctaggcatgactcagttactcagaaataattatttttcaatcttagtgtcttctgtgcctagttttcttatccctgaaatataatctttgatttctatataatctaagtcacgttcatctatcccaggaatatctgtgaagatacatcacccacaatttcctctcatttagtaactataattcagcccttctgtcgctstcctacataccaaaatattgctgtacacagctacgtttatggattctttatccatccttggctggaccgctaatgaaatacccacatgccattctcaggcagtgaagatttgagagaaagagctctatttgaaaaccgtaacaagtccgtggggtttccatggttggagcrcatgctaaaattctctctctctcttttattctcagggaaagtttcaaatggaagacttagtrtataatccggaacaagtgccacgttactaccaaaatgcctacctgcacctgcgacccttctacagcacaacccgcagcttccttggcatccaccggctaaacggccccttgaaatgtggccagccccaggaagtgctggtggattattacatcgacccggccgatgcaagccctgaccaagagatcagcttctcctactatgtgagaccrggaaacggggacgggtgagagtatgctgggaaggaaagagaatgagaagagtcagccagagggtgcacctaggctatctgaattgcagatgcacatctaattaaaaacaattttaaagccacactaaaaaagtaaaagaacagttgacattaattttaaatgtattttttatttaacccattatatccaaaatattaacattttaacacgaaagccatataaaaagttttaatagatattttacattcttgtttcaacggtgtctttgaaactcagtatgtattttacacttaaagcgtatctcagtttggactgagcacatttcaagtattcaatattcctttttttttctttttttttttttttgagacacagtctcgctcagttgcccaggctggagtgcagtggtgtgttcttggctcactgcaagctccacctcccaggttcacgccattctcctgtctcagcctcccaagtagctgggactacaggcgcccgccaccacgcccagctaattttttttgtatttttagtagagacggggtttcaccatgttaactaggatggtctcgatctcctgacctcgtgatccacctgcctcagtctcccagagtgctgggattacaggcatgagccaccgcgcccggcctcaagtattcaatattcctatgtggctatgagatactgcatggcccagtataggtgtaagagatggaaaacattgggggaagaaagagattctgagcaggaacacaggaaaattgtgtgggaaaataaaatgaggaattacctgagaaaatagtgctggccaggaccaaaaaaaacaaaaacaaaaacaaaaccagctgggtggttgggagggagagtggggagggatgggactcaggatactttttttttttttttaatttatatgagacagggtttcgccatgttggccaggctggtcttgaactcctgacctcaggtgatctgcccaccttggcctcccaaagtgctgggactgcaggcatgagccaccgagcccagccaggatacatttcattctgtgttccattggtcaatattatcaaatagatgatatggggttaaattcacatcgatagcagcctcattggggaaataaaatcataacttggtagcctgaaagcaatgtataaggataagcagctttcctgtcaccttggtgacagtcaggaagtagaatggaaacctcaggtttgatggctcggagcctctttgttccgttatcctcctgtcagtctatgagagactttctcccctctggatcattgcagtagcttccatggtttcagtgttgtcgttaagtgaaaaaaaaaaaatcatcctaatacaacgaaaagagaaaagataggtggaaaataacaagtccagtgataaagcgggctctgtcttcaggaccgaagtgtggggaggtgtaggacaaaagtgaagttagggccgagccacgtggaatggctaatgctgggcaggcgtccaaggaaccgaccttggagccctgcaggagcgtgggatgagagcctgcttgcaaacaagatcaccgagttctgtttcaagtgagagtggacgggaagggggagttagaagaggagatttctcctctagagggttcaatgtcagaagggctcagggtggtttaggatgaaattatttccactgaattttaaattgagctgtaattaaaaaacacttatgaggatagattttcgctgactttctgttacaaagattataagaaaataaaatttggagatcttcaagaaatggcagacagttatctatggtgaggaacaatttctatgctgtcagactcctcccatccacctgcgtggttctcagccagacctccaactgcaggaggagccaccaggacccgttggcagcatcctgcatttgtcaagctagtggatgctgggtgaggtattgacccggactctgaactgtgaaaggaacctctcctcatgaagggatgcagagatgctctggaagttggtccaaggtgaaattactgtaacttctgtgcagttgattcttttcttttcttctttagttaatagggaaaggaagtttggtgatggaggggcagaaacacctgaactctaagaagaaaggtgagtgtacatgcttttcccggaagcaaacaggatatttttaaattccagaaaacaattcttggccaggcgcggtggctcatgcctgtaatcccagcactttgggaggccgaggtgggcggatcacgatgtcgggagatcgagaccatcttggctaacatggtgaaaccccgtctctactaaaaatacaaaaaaaaattagccggacgtcggggcgggcccctgtagtcccagctactcgggaggctgaggcaggagaatggcgtgaacccgggaggcggagcttgcagtgagccgagatcatgccactgcgctccagcctgggcgacagagcgagactccgtctcaaaaaaaaaaaaaaataaataaaataaaataaaataaaataaaataaaaaaattcttatccacagaagtaatggaattggagcactaacagttatcacaggagaagagaaaaatgagaagtaacttgcaccatggtgcctgcactggctcagtgaaaagtacatatggttagatgccgttggcaggtgaatgtgcattctgattttcctgtatattccctcttctctttcaggactgaaagcctccttctctctctcactgaccttcacttcgagactggcccctgatccttccctggtgatctatgccatttttcccagtggaggtgttgtagctgacaaaattcagttctcagtcgagatgtgctttgacaatcaggtaaaatgatagcggagaagggtgaagataaaagttgggcatagagaaagatcttgtgtgtgctgcggttggaaacaagacaagtcagggaaagaagatagtgttgacgttggatgttgtattatatttatatctttagtgtttggggtttgtgttgaaatccatctctctcctactttttattttaagaagtcatgctggctgaggtgcagtggctcactcctgtaatcccagtgctttgggaggccaaggcagagggatttctttaggtcaagggttcaagaccagcctggacaacatagcaagatcctgtctgtacaaaaaaatttttaattagctgggtgtgcagcactttgggaggccgaggtgggtggatcacctgatgccaggagttcaagaccagcctggtgaaaccgtgtctctactaaaaatacaaaaattagccaagcatggtggtggatgcctgcaatcccagctacttgggaggctgaggcaggagaattgcatgaacccaggagacggaggttgcagtgagcaaagaacacaccattacactccagcctgagtgacagagtgagactctgtctcaaaaaaaaaaaaaaaaattagttgagtgtggtgatgcatacctgtagtcccagctagtcggaaggctgaagcaggtgtatcgcttgagccccaggagttcaacggctgcagagcgagaccctgtctattttttttatttttaaaaaacagagttttctttttgttgccaaggttgaagcgcaatgggggaatttcggttaattgcagcctttgctttttgggttaaagggatttttttgcttaaaactcccgagtagctgggtttacaagtttgccccaccatgccgggtttttttttttttttttttttgggtttttaaaaagggggggggcttccccatgaaaccccggggggcttggaccctcgtcacagggataccccccggtttggcccccaaaggggggggaatacacgggaagcccctttttttttaaaaaaaaaaaaaaaaaaacccctttggggggaccccctgtttttatatttttttcccacggggtctccttttttttggttttaaaaattttttttttttttttgggggggggcggggttccccactttttttgggggaacccccctttggggagggggtgttttttaaaaaaagaatgttcccacggannnnnnnnnnnnnnnnnnnntacttggtgtaatccatcaccccccaaacccctatggggagtccagtcacttcataggattaaatcccttgcaattccaaagtttgattttcatatgtaggaggtatctcatgtgcctggccagaatattgtaaaacttaagtgtcataaaagggcaaacatttatctaacaggtttctatgggtcattaatctgggtgcagcttagctgggtgcctctggctcaaggtatctcatgaggttgcaatcaagctgtcagtcaggactctggtgtcatttgaagactcgactaggagaggattgatttttcaagctcatcccaaagtctctgatccttacaggctgctagactgaaggacacagttcttgacctcagcttttggctaggggcctcactcagtatctcatcacatgaatctctctggtggggtgcctcatcacacaacagctgtttttcccagagcaagcagtttgagaaaaggggtgcrcccaagatggaagctgcagtcttttagtagctgggattacaagtatgcccccccatgcctggcttttttttttttttttttttttgtatttttagtagagacggggtttcaccatgttaggccaggctggtcttgaactcctgacctcaggtcatccacctgccttggcctcccaatgtgctgggattacaggcatgaccctgtctctattaaaaaaaaaaaaaaaaaaaagccatactgggaagccacatgttctatatagttattccacatgttctctctactttttgtcttctaaactttctctatccttctactgtgctgctcacgtttcccaactctatcacggcatacacgtcctgaagagctagactttacaaagaaagataagtacaaaagtgaaagaatgggttggatgtcatagctggggcatatttgctgatgacccaaattatgttgtttcccttcctttccaggctgacctgatccccaagttatacctttcccttccccaggtktcccttggcttctccccctcccagcagcttccaggagcagaagtggagctgcagctgcaggcagctcccggatccctgtgtgcgctccgggcggtggatgagagtgtcttactgcttaggccagacagagagctgagcaaccgctctgtgagtaactgtctgctgacagagtgggaggagggagttgatggagaagacaattaagaggtaggtttcaggcaggggagagaaagtcttagggaaataatgcactgccataaggcggtaaaaaggctggtgtgaaaatgaagttagaaagtgtaagagggctgggcacggtggctcacgcctgtaatcccagtgctttgtgaggccgaggctggcagatcacctgaggtcgggagttcgagaccagcctgaccaacatggagaaactctgtctctactaaaaatccagaaaaaaaaaaaaaaaattaactgggcatgggcccatgcctgtaatcctggggaggctgaggcaggagaatcacttgaacctgggaggcggaggttgtatcattgccctccagcctgggcaacaagagcaaaactctgtctcaaaaacaaaaaaaaaaaaacaaaaacaaaaaaagaaaggataagagaaaggcatggttagtatgaatgcagagacaagaaaagagaatgagcctgtaatcccagaactttaggagaccaaggcaggcagatcacctgaggtctggggttcaagaccagcctgaccaacatggtgaaaccctgtctctactaaaaatacaaaaattagccaggcatggtggcgcatgcctgtaatcccaactactcaggaggctgaggcaggagaattgcgtgaacccgggaggcagaggttgcagtgagccgagatcgtcccactgcacttcaatctgggcgacagagcaagactccgtctcaaaaaaaaaacaagaaagagaacgaaataggggataggattatgaaaaaataggtgagatagaggttaaagttttagacagtgagaaaggtaattatgacagaatgaatataaaaataattctgaagtaataaagagaaatgatacaggagtagtgaactgagcaccagaatctgagagaagtttctcaactgatatcactatatcaatgctttatttcctctccccctcttgtcccaggtctatgggatgtttccattctggtatggtcactacccctatcaagtggctgagtatgatcagtgtccagtgtctggcccatgggactttcctcagcccctcattgacccaatgccccaagggcattcgagccagcgttccattatctggaggccctcgttctctgaaggcacggaccttttcagctttttccgggtaggtcttcttacccattttgttcttatgggaaagatggtggtgggaatgggcaaaggaaagttcatatctaagaaagcagagagactcatatgggcactgatgggaacaaaatcttgaaagaagcttctgacgtgtaaggtcgcctctgttggcccttatgcttgaagaagatgtccaacctagtcttcctctttttgttgtcctcaaacactgatttccatgagatcaatcaggagggaaaattagagaaggtagaccagaggtctcttatcattattataaaaaataatttgcacctattctatgagcaggatttgggatgctgtgtgacccaagtctgaccaggaggtccctgaggtcaggaactaggtcttgttcatctttgtattctctctaatgcctgacccttcataaggctcattgtatttttgttgaattgagtacgctgatatggtccctaccctcagcatgtttacagcgtaagtcaaatagtaaggacatagcgaataatatttggcagaaccattacatgtatgtaatgatgaaataagtttaactgaaagcctttcatgctagctggaacagaagccaaccagcctcagtggctgagtttcaggtaagaacacccaggttcaccattaattcaaaaagaatgttttgtttcaactctttgatggtggaattcctgggcagtagcccttgtagttggggaagggaccaccttaatacttatttctctgatgcctatcaggacgtgggcctgaaaatactgtccaatgccaaaatcaagaagccagtagattgcagtcacagatctccagaatacagcactgctatgggtggtaagccacctctgtggtctgtggattctctgagatgttaacagtcctggaactctgcagatttcctcttgcctcctgttcttgcactgagcctctagcccgagaatgctaatgggttgtgggtcacagatgcaggacagtttcccaagtgttctctctctggggagagcttttgaagcctgaagcttatgtatccattccccggccaaacctccttggctatcacttccctcgatggcctttgtgactagttagttcctctttggtccttcctccttgcctctgactggatgttctctgcttccctctaaatttctttctagtaatccctccatcccaatttatgtcacaacaagaagtctcctgtttcctaaagttttcgtattctcaatttcatcagcaggcggtggtcatccagaggcttttgagtcatcaactcctttacatcaagcagaggattctcaggtccgccagtacttcccagagacctggctctgggatctgtttcctattgggtaagtgatgactcaaaagtacagtaaagggccaggtgcatggctcacgcctgtaatcccarcactttgggaggcttaggagggaggatcacttgagaccaggagttcaagaccagcctgggcaacataatgagcttctgtctctacaaaagaaatwaaaaaaatagccagatggtagttgtgtcctacttggaaggcygaggtggaaggatcacttgagtctgggaggtggaggctgcagtgaagcaagatcacattgcttcactcctgcttgggtgacagagcaaaacccttctcaaaatcaacaacgacaacgacaacaacaaacccagaaaaaaaacagtaagattctgcaatgtagagcctgtagaaaactcagaatcagacgcattcctaatggatctaaatcttaagcaaagaaagcttgatggggtgtgggaatttatttattttccggaattctttttttctttttatttttaagacagagtcttgctctgtcacccaggctggagtgcagtggcatgattttggctcactgtaggcctcaacctcctaggttcaagcaattcttgtgcctcagcctcccaagtagctgggactataggcacatgccaccacacctggctaagttttgtatttttagtagaggcagggttttgctatgttggccaggctagtcttgaactcctggcctcaagtgatccacccgccttggcctcccaaagtgttgggattacaggtgtgagccactgcgcccggcctacctgaattcttcatgcattcatatacaaccactcaaaacaaatccacacaattccacactcacacattgcaggccctgtgttctcactacagaaccacacacatttaaaggtatatattgacatcaatttttgctcactgcttgcatatccattttgacaagccctgagaccacacatcctcagactcagagggcaccagcctctctgtcagatgtgcttgcacagagatgcccaccccgactccccaccatagtccccctcctccgtatgagtgcagcctcactcacactgagactcacctgttcagttgcctctttacttctccccatacaataacaataacaattttacttctgcagatgaatttgtagctttttttttttggacagggtcttgccctgtcacccaggctggagtgcagtggtgcaatcatagctcactgcagcctcaaactcctgggctcaagcaatcctcctgcctcagcctcctaagtagctgggactataggcatgcaccaccacacctggctaatttttaaatttttggtagaaatagggtcttgctatgtttcccaggctggcctcaaactgctgggctgaagctatctgctcacctcagcctctcaaagagctgggattacaagtgtaagccagcacaccccaccgaatttgtggcttaattcacaaatgttctccttgccccacgctacctctgcctcatgttggtccttgtgttttcacagtaactcggggaaggaggyggtccacgtcacagttcctgacgccatcaccgagtggaaggcgatgagtttctgcacttcccagtcaagaggcttcgggctttcacccactgttggactaactgctttcaagccrttctttgttgacctgactctcccttactcagtagtccgtggggaatcctttcgtcttactgccaccatcttcaattacctaaaggattgcatcagggtgagagctggggatacaggaatcaggtgtcagccctggaatcacacctcccccataastttgtctctaaattggaagcatcccaattttccctgggaaagagaggagatgtcggcgtctcagcccccaggtttccccaggcctctatgcactacctcctttgtttgtaccctttgtctcttaaacatcctccgtaggttcagactgacctggctaaatcgcatgagtaccagctagaatcatgggcagattctcagacctccagttgtctctgtgctgatgamgcaaaaacccaccactggaacatcacagctgtcaaattgggtaagagagggaagtggtagacgggcgaggaaagccagcagcagaagaccagtgactgagcactcagtcttttcctctgccacatctgctttgcttcctcctccattttccactatttttctccctcctaaggctgttataagtcaatacacaaacactctttgataggtgaccaaacaaatttgttcaaaccggaatattttgagtgtgaaagggagagcttttaatatttatagctggacaaggaatacatggtcatgtaactaatcaaggacttactataagagtccctgggccaggcactattctaactgctttacatatattaactcattaaattgattgactaattaatttttattttatttatttatttttgagaggaagtctcgctctgttgcgcaggctggagtgcagtggtgcaatctgtgcttactgcaacctccacctcctgggttcaagtgattctcctgccaagcctcccaagtagctaggattacagtcgcgtgccaccctacccggctaatttttgtacttttagtagaggtggggttttgccatgttggccaggctggtctcaaactcctgacctcaggtgacctgcctgcctcggcctcccaaagtgctgggattacaggcgtgagccgctgcgcctggccttttatttttttttagagagacaagatcttactctgtcacctaagctggagtacagtggtgtggtcattgctcactgcagcctcaacctcccaggctcaagcgatcctctcacctaggcctccggagtagctgggactataggctcatgccaccaccatgcctggctaattcagttggcagagaagcggtcttgctctgttgcccaggctgttctcaaactcctgggttcaagtgattctcccgcctcacccttccaaagtactgggattacaagaatgagtcacygcacctttaacttgtttaatcctcacccccaaccctatgggatgtcagtcactcatagattaaatccttgcaactcaaagtttgattttcatatgtatgagttatctcatgttgcttgacaaattattgtaaaacttaagtgtcataaaaggacaaacattatcaaacagattctatgggtcattaatctgggtgcagcttagctgggtacctctggctcaaggtatctcatgaggttgcaatcaagctgtcagtcaggactctggtttcatctgaagactcgactaggagaggattgatttttcaagctcatcccaaagtctctgatccttacaggctgctagactgaaggacacagttcttgacctcagcttttggctaggggcctcactcagtatctcatcacatgaatctctctgctgggctgcctcatcacacaacagctgtcttccccagagcaagcagtttgagaaaaggggtgcrcccaagatggaagctgcagtcttttttgtaacctaatcccagaagagtcattactttcaccctgttctctttaacagaagcgagtcactcaatccagctcacactcaatggatgtaaatatcaggatgcagggatctctgagggcccttagaggttacctaccacactggactagcctctctggcatcacctgggagcttgttagaaatgcagaatatgggccccaccccaggtctatggcagcagagtttgcactgttgcaagatccccattaaagtttcagaaatgctgatccaaatgggaatggacctcactggtacctctggcaatagggctaatggcttcccttcttctttctctcaggtcacattaactttactattagtacaaagattctggacagcaatgaaccatgtgggggccagaaggggtttgttccccaaaagggccgaagtgacacgctcatcaagccagttctcgtcaaagtgagttttcttcagaggtagagacagcaaccaaccgagggatgctcagcatctcgtcttgctgtgagttagtctctcacagcaaccatactccagtccaaccaggcagcttcaactttctccttccctggccccttgaacatttgcctaatccacacccacggcctatgaaagcacctaaaaccsggcacctcataggcactcaacaaatgttagtttacctaattaaaatgtctgtcttcatcaatagctgcctttttcgtcccatcatgaagcccattgtcaatcttgcctcttagaagttgcctaaatgtgkctttggctctagcacttgcccagaaagaactttacagaaagggcccatccttgggttgacgcagagttckkytgassywsagtgagaagctcttgtctgcagttctgagggaagccctgggggcacagcgaggggcctcccttccctttcctttagtgccatccctcctgatgttcatctttgttgtttttatctgtgtctctcttcatcgcagcctgagggagtcctggtggagaagacacacagctcattgctgtgcccaaaaggtgggtggactcagagcaggattggtggtgagaattcccttagagggcaggagattttcttttcattttttttttttttttgagacggagtctcgctccgtcgtccaggctggattgcagtggcacgatttcagctcattgcaacctctgcctcccgggttcaagtgattctactgccttagtctcctgagtagctgggactacaggtacatgccaccatgcctggctaatttttgtatttttagtagagatggggtttcaccatattggccaggctggtctcgaactcctgaccttgtgatcctcctgccttggcctcccaaagtgctgggattacaggcgtgagcyactgcacccggcagcaggagattttcataggcaaaaggaggaatgcatagtaccagaaggaataggagagtctgaagtgccattcctcatggggctgattaactgggaggcaggaggaagaagagaaagtgtgcagcacgatgatgactctctgtggaatttattttcagcaagatcactatgaatagtacccagtgctttctgcatcccagagaaagcaccgagtacagaaatccctggattatagaaagttcttctaaaattttgtcttgagaacccctgccattccccatcttctattgtgtcacctttttttctgcatctsacaggaaaggtggcatctgaatctgtctccctggagctcccagtggacattgttcctgactcgaccaaggcttatgttacggttctgggtaagcagttagagattcttgactcagaaaggaaaaggckaatggaggctgcaaaggtgtggagtggggcgggacatacggacctatccggagagtgtaactaataacaagtgatgaaggaaaaagagcstattttatataggagggaaatacagtgtaggcaacagtacagatgggattagacttgtactctagttaaaaatggaagagagtcagggtaggaagaaggtaaggtcgctgatgcttgattttaggtttagacagtctataaattgggtgaagggaaaacagaatatttgcagcaaccattttcaaaactgaggaatttgggtatagtttagggaagatacaaccatatttacaataggcagcacacttactgtttggggcaagggaggaagtgggttgaaaagcatgaacktagaaatcatatctaacctgtcatttaatagccatgtgaccctgaacaagttagtgaacagttctgggccttctttcctcttctgtaaaacagtgataataacctacctctcagactggtgtaaagattaaatgcaatataaagtccccagcacaatatctagcatgtagtaggagccctatgaatgttaggctctttctttactccctcaccctctattgagatcctttgcagtcacagtgtctctgttttgtctattttattcgtaagtctgacatagcacttatcttattgtattagagttcactgtctatatctgtcttccacactgtgttgggggctcctgaagaggaagggccacatctttttcttttgtgttcctagtacagttcctgcaacatagttgacattcaggacacatttatagattgaattgagcttgttggctacaatgcagatgttaatgagtcacttatgtcaggttcactggcttgggaagtatatgaaggggtcagtgacaacttggaaaagagtgtcagaactgtgttttagagaaacttggtgatttggagggtgaggaacgtacatgcagtggtagaggagcttaagagattgatcctaagtgttataagttttgtcacatcactcatcagctcagtgacatgtcttcttaaaagccctgaactctcttagatagcttatgtgcctctccgtgtcccctagcacctcgtacatatccagtatgacattgtagtactgtattaaaattgtttataatgaataaaaattgtaatgtgttgtaatggtttgctcctctgtgagtttttttgagggtagagaccgagtttgatttactgtggtcttcccaggacacacagtaggtactttttttttttttttttttgtatttttagtagagacagggtttgtccatgttggtcaggctggtctcgaactcctgacctcaggtgatccaccctcctcggcctcccatactgctggaattacaggcgtgagccaccacgcccggcccatagtaggtacttattaaatgatagctaatacgtgtttgttcagtgaatgatgataactcttagagggtcccttcttctctgtaccccyaccttctctctctccttttggatcccaggagacattatgggcacagcyctgcagaacctggatggtctggtgcagatgcccagtggctrtggcgagcagaacatggtcttgtttgctcccatcatctatgtcttgcagtacctggagaaggcagggctgctgacggaggagatcaggtctcgggcagtgggtttcctggaaataggtaagttggttcagtctttctttcttgaacactctcctccactaggccctatgacagattgatgatacagggaattccagcccctcaagtgtcccatatccttgaacggcatgggggtgttttctgaagttgtcgctgtgatctaaaaccacatttggcttcccagggtaccagaaggagctgatgtacaaacacagcaatggctcatacagtgcctttggggagcgagatggaaatggaaacacatggtaatatcacccaattcccaatgagttctgtactccagagcrtaattcctgagccctctggaactattccactacctctccccttaacccctttccttcttgcactcagtcttctacctctttaatactgtttatttcaccctcatggatggtcaagtccctcgatcttcctgagcttgtgcctcccctgttcttgtcctcattggtgcccattaatgcctctcttttctaggcctgctatggcatatgttccctcagctccccttctggaagtatacacccaaataaatgaagaaatgattgcaccctcacctggaaattcctcttcatgccatattttcctctttacccatgtaggctgacagcgtttgtcacaaaatgctttggccaagctcagaaattcatcttcattgatcccaagaacatccaggatgctctcaagtggatggcaggaaaccagctccccagtggctgctatgccaacgtrggaaatctccttcayacagctatgaaggtgcggatctgtccaggagcctgcagccaaccactgtctcgaaggaccccacacctctgaccgagtagaagcaaaagagcactggcctgggaatcagttttctcctgatctccactgtggctctgggtgaccgtgatcaaaatgcttagctggtctgggcctcagttttcatgtctgtagaatgagaatacagatgaagcctgggtgcagtggctcatgcctgtaatcccagcactttgggaggccgaggcgggcagatcgtttgggcccrggagtttgagaccaccctgggcaacatggtgaaaccccatctctacaaaaaaaatatgaaaaattaatcaggcttgttagtgcatgcctgtagtcccagctacttgggtggttgaggttggaggatcacttgaacccaggaggtcaagcctgcagtgagccgtgattgcaccactgcaccccaacctgggtgaccgagtgagaccctgcctcaaaaagaaaaagagaatgtggactggaacatggttctcaaagcatagttcccagatcaggagcattggcatcacatgggaacttgttggaaacgcagattctgactcccagcccacacctactgaatgagaaactctgggagggtgggccagaaatttgtgttttgacaagccctcctgattattctgatacacactgaaatttgatactactggactaaaagatctctgggcctcttactgtgtcaccaaatccatctgggaaagccatttcctgtggtgaggactagtaggcagcccaacgtcttttgtaagaagtttactctattggkcactattctaggcacgtggtttatttgatattatttcatgtttacaacaaatcaatgagctaggtattggtatgccattattaatcccattttacagatgaagaaactaagccatggagactaagtaaattgcccaaggtgcatgctaataagtggcaggactgagatttgaaccaggcagttgcactccagaggcactgctttcttctgttcactaccttgtctgtacctgtcccaagcagagggcgaggcgtagatcctgcaggataacttgttcaattcaggacacactcagtgcaagaaagacttgtataaacttttctagagagatcacttacattgctattccagggcaaggattaaaaatcttgagtgttaaaaaaaaaatctatttataggattcattagtcttcctctgcaggatcttattagtctcccctaagtttttgtcttcttcttctcttatacactgtatgaaatatgcgtgggggccaggcgcagtggctcatgcttgtaatcccagcattctgggaggctgaggcgagtggatcatgaggtcaggaattagagaccagtctgaaaccctgtctctactaagataaaggacttgactagagcaagatctcagaggtattcttccttctttcccttttttttcttttctttttttcttgagacaagagtcttactctgttgtacaggctggagtgtagttgcgcaatcccagctcactgcaacctctacctcctgggttcaagtgatctcagcctcctgagcagctgggactacaggcatgtgccaccatgcctggctactttttgtatttttagtagagatggggtttcaccatgtttggccaggctggtcttgaactcctggcctcaagtgatccacccgccttgacctcccaaagtgctgggattacaagcgtgacctatgcgtgcccagcctcttcctactttcttttgagagcaggccagtccattgagaaatccatcctctgtgtagmcaaggttagtggtgtggcacatgagctccagagttaaatgtcctgggttcaaattccagtcctgctgcagatgagccatgtaaccgtgagcaagctatttaatctttttatttatttacttattcatttttttgagacagggtctcactctgtcacccaggctgaagtgcagtggcacgatcatggctcactgcagccttgacctccccgggctcagatgatcctcctactttagcttcctgaatagctgggaccacggatccacgtgccacyacacctggctaatttttgcaggttttgtagagttggggttttaccgtgttgcccaggctggcctcaaactcctgagctcaagcgatcctccccaccgacttggcctcaagctgggataataggcataaaccactgtgcgtgaccacaagctatttaatcttgttaagtgtttgttttcttatttatagaatgaggataataatttgagtagatatttttaaaaatttgcttagctctttctgggaaaggcgataagcagggaaggtctcacctaatctctgctggagaagggctgggtattgtgctgcttgaggggagctgcatgtgaggaggctcagatgcggtgatgcggcagattctctccttattcctcccttctttaaagctcttacccttcctaactccttctcttgggtttcttaaatacccactcagctgaagtccacatgctgcctcctgcaggctgtttaaggctgtgcagttatgaagtccaaactgttccctctttgtgtgtcctggaggcttggagctgcaraaagcctgtggaaaaaagagctttcttttcttttttctttttaaaaattattcatctattcagaggggaggctgttttgcaatctgcacataattcttgcagctgctgcctgytgccctgactcactgcctccctgtttgcctctagggtggtgytgatgatgaggtctccttgactgcgtatgtcacagctgcattgctggagatgggaaaggatgtagatgtaagttctcctggctcctgctcttgataccctccttctcatgcgtattcctagagacattcacccatctttgtctctagtcacccttttaaggtcaagaaggataagatgatttcctgattacttgccatttttaaaggaatgccttataagttatagtcttcatcttcactttttaggacccaatggtgagtcagggtctayggtgtctcaagaattyggccacctccaygaccaacctctacacacaggccctgttggcttacattttctccctggctggggaaatggacatcagaaacattctccttaaacagttagatcaacaggctatcatctcaggtatgttggtcctgttgagagttctttgaaattgtgaacataagctgtgagttatctataatctccctagtaacctctgtcccacacatgtactctaggattcattttagtaacagttattaagtcatcaaattattgttgggaggtttgtgagaaacacacgcaagtgctcaaagggcatttttatacttttttttcttttctttttgagacggagtcttgctctgttgcccaggctggagtgcagtggcgtgatctcggctcactccaagttccgcctcccgggttcacgccattctcctgcctcagcctccccagtagctgggactacaggcgcccaccaccacgcccggcgaattttttgtatttttagtagagacggggtttcaccgtgttagccaggatggtctcgatctcctgacctcatgatccacccgcctcggcctcccaaagtgctggtattacaggcatgagccaccacgcccgagtttctctcttcttgcccaagctggagtgcaatggcgtgatctcagctcactgcaacctctgcctcccaggatcaagcaactctcctgcctcagcctcccgagtagatgggattacaggtgtgtgccatcatgcacagctaatttttgtatttttagtagagaaggggtttcgccctgttgaccagggtggtctcgaattcttgacctcaggtgatccacctgcctcggcctcccaaagtgctgggattacaggcgtgagccaccatgcctggccacatttttatacttttaatgtgaagagaaactacattgaagaagctagtcggaaaatatattggcattgtggaatcacccttttggagatctttgaaagtgctttgatgtaggaccactttaaatatttttaaaaatttttattttactttttatttttttgagacggtgtcttgctctgtcacccaggctggagtgcagtggtgcaatcttggctcactgcaacctttgcctcctgggttcaagtgattctcctgcctcagcctcccgagtagctgggattacaggtgcccgccaccacactggctaatctttgtatttttagtagagagggggtttcaccatgttggccaggctggtctcagaatcctgacctcaagtgatctgcccctcttggcctcccaaagtgctgaattacaagcgtgagccattgcacctggcctggaccactttaaatatatttagaatactatttgaagtatgacagatcttgtaaataaaatattaatgcatttcatttatctggctgtgtatttaaaattattcttccaggcagaagtgcagtctcagccttcatttatatgagcgtcatggctgagctgtcctctcacagggggtcaggtagttttttctcttgtgtctaagcaactccagtcatgaaatgttgtccgagacaatgggttaaatacacctgttccaccgtrtattggtttattgtgatgatctcttttccattatcttgtattgcaagctcacatgtttcctgttacgttcttccaattagattgcccttctgtggttacttattatctctaaaattctgtttaattagtcttctaacktacagtcttctcatttcttatttatttttcttcaagttatccattatctgtcatcttggctgtcacagaggtttcttttggtctcattctattggactgccttctaagcatgtttcatatagttrrcctcattagcatttcttcatggtttctcagaattctttcatatactctgccatttttattctacttaaaatgttaaatctttttttttttttgagactgggtttcgctcttgttttgttgcccaggttggagtgcattggygtgatctcagttcaccgcaacctccacctcccgggttcaaatgattctcctgcctcagcctcccaagtagctgggattagaggcacgcgccaccacgcctggctaattttgtatttttagtagagttagggtttctccatgttggtcaggctggtctcaaactcccgacctcaggtgatccacccgcctcggcctcccaaagtgctggattacaggtgtgagccaccgcacccggcctaaatctttgattaaatgaaataaatgctgaaaaattcataaaactgtaagcaaacaaaaattgcccccaaacacagagattcttataagaagcttctatttacctatttccattagcatcaaaactgataaattaacaagggtggttttcatgtaattgctggaggcaggaacatttatcgatgcttctagctttacacacaggcacgcacatgcatccttgcatttacatcaaggtcaattaatcagctaaatctaagaaattttttttctactctgtttaattctcagttggtacttactctgctctaagatgctgcatttacaaagtgaatgtgggaaagccagttccttctaaggacatcctagttatgtttctttttccataggagaatccatttactggagccagaaacctactccatcatcgaacgccagcccttggtctgagcctgcggctgtagatgtggaactcacagcatatgcattgttggcccagcttaccaagcccagcctgactcaaaaggagatagcgaaggccactagcatagtggcttggttggccaagcaacgcaatgcatatgggggcttctcttctactcaggtaaacagcctgttctcccactgccacttatcaggtagaattagatcttgtgtggagatagaggaaaacatattgtccttgccttctcggtccaggggcttagagagaggaaaagcctgtgaacaatatatggaagtattcataaaatgggttataagagcacattaatagtaccagatgtatttaattttctttttttgttgttgaatgtgaaacattggggccgggcatggtggctcatgcctgtaataccagtgctttgggaggccgaggcaggcggatcacctgaggtcgggagttcgagaccagcctgaccaacatggagaaaccccatctctactaaaaatacaaaattagccaggcgtggtggcgggtgcctgtaatcccagctacctgggaggctgaggcaggagaatcgcttgaacccgggaggcagaggttgcggtgagccgagatggcgccattgcactccagcctgggcaacaagagttaaaactccgtctcaacaacaacaacacaacaacaacaacaaaaattttaactttgtttcagaaagattaatcagccacttggtgtgtgagataatttagagaggagaaacattggacttgaagagatcaggagactgtttcctttatctaggttaggggtaaggggaaattgggaaattgaatgagtggtgtggcagtatggaaaaaacagaggggtagaattgtatgataaactcaaatcataaaaaattattttagattataatgaagagagtagtcattaatctatgtattctgaaaatattaaatatctaccatgtccaaatcactttgatgaggctacagaaataactaagaaaatgtatttcttgttctcatgaagattatattctgatttgttgaaattagccaatttcactgaagatataacatgtaaatcagacctgaaagaatgaacatcttttaataggttgcatgtttggtaaaaatgttaaaagcaccaagtttaggccaggtgtggtggctcacgcctgtaatcccagcactttgggaggccgaggcaggtggatcacgaggtcaggagatcgagaccacggtgaaaccccatctctactaaaaatacaaaaaattagccgggcacagtggtgggygcctgtagtcccagctactcgggaggctgaggcaggagaatggcgtgaacccaggaggcggagcttgcagtgagccaagatcgcgccactgcactccagcctgggagacagagcaagactccatctcaaaaaaaaaaaaaaaaaaaaaaaaaaagcaccaagtttaaatatggtaatgacttaattgaaacttaaaaaaattatatggtactatgcctccctgtttcagggaaattcttggccaaagatcacaaaatactccttcttgctcggtcctgaataattataatatataataatatttttggaaagcagtgggtgaaatgtttacaactctcagtgacaggtatatgtcagaatcctttttcaatgaaatccttggctatcacaagaagtcatatatcatatattacccacactggtttttcagctgacagtgaggtccctttctttgaattgtctccatatgttcaagcagtaaaaaacctccctggctccagtccacaaaaggtaaacaaaaattgtttgtagatggtgaagctgcacagatagaacttcttcacagcttcaccagggtgggtgacctgtcttcctgttttgtaggacagtgataatgtcgaaataagaatgtatttttcatttgtgagatgaagaaatcgggtttttttttgtaatagatattttttataatagatattttacacgagtgagatataacaattttgttgaacacttcattcatttttctttccccttgtaatttatatgaattatgttttcagaatgaaacagttcaaatatcactgtaccatgctcacttagtgacagtttatctgtcttattcccagagaaataaaagattgtcacatggtataatggctaagaagccagcctgcagggaaggactttcctagggtcccttatactccttccaactgtcatgtagaagatcattacacagttaaatgacttcatagactgcaatttctagggctatcaagttactactgtttctcccccaaataaggaagctgtaaaatatatactgaacaattatccacttgcttctagcaataactcattctgaaactgttggtttctgaacatgaattgattaggttaaccaagtaatctgtggatgttcagtagtaccttgttgatggtgattttctataaaagcatgctactggctgggtrtggtggctcatgcctgtcatcccagcattttgggaggccaaggcagccggaccacctgaggttgggagttcaagactagcctgaccaacatggagaaaccccttctctactaaaaatacaaaattagccggatgtggtggcacacgcctgtaatcccagctacttgggaggcttagggaggagaatcacttgaacccaggaagcggaggttgcaatgagctgagatcgtgccattgcactccagcctgggcaacaaaagcaaaactccatctgaaaaaaaaaaaaagcaagctactgtgatttctaggccagcttctccagaggaggtgggtatagttctctaaatacttaaagaagtcatcatccaagccaactaacaacaaccagatgtgtgggttatagagttgttcaaggttaattccaatggctcacaaaatggtaagtatacgtttggttgtttccctcaggatactgtagttgctctccaagctcttgccaaatatgccactaccgcctacrtgccatctgaggagatcaacctggttgtaaaatccactgagaatttccagcgcacattcaacatacagtcagtyaacagattggtatttcagcaggataccctgcccaatrtccctggaatgtacacgttggaggcctcaggccagggctgtgtctatgtgcaggtaagtagagatccatgagaatgagcrgacattgggaaggagagtcggagagcatcttccccttaggccttctctctctctttctttctcacttgtaagaaaagtagtttgaactgtacaatctttaaagttctttccaastytgatttggctacctatttcttcctaccagacggtgttgagatacaatattctccctcccacaaatatgaagacctttagtcttagtgtggaaataggaaaagctagatgtgagcarccgacttcacctcgatccttgactctcactattcacaccaggtgattaaagctggggtgctggtggccggcagagcacctggtcataggagctgagctgggacacttgygtgtgtgtgtgkctgtgtatgtgtgtgtgtacgtgtgtgtgtgtgtgtgtgtgttggggatgcagagtgcactgaagtaataggctcacatgtgttttcttcttcctgctctcagttatgtggggagccgtagctcttccaatrtggctattgtggaagtgaagatgctatctgggttcagtcccatggagggcaccaatcagttagtaagttacttctgttttcttcatttatctagytgtgaggggacctaacgttataatttaaaaaactggtaaaatgggcatcatggcgtgtatacacacacacacacaaggcatgtatatacatacatatatatgtatgtatatgtatgtacacttgtaagaaaagtagttttcatatatatatatggcatccatatacacagtatgtgattatatatatgtgtgtgtatacatatgtaggtatatatacatgtatatatgtgcatgtatgtacatatatgtgtgcatatatgtatatattmatacacacaaactcatgattggattatttaaatgggctgcaaggttgtagcagatatatgacatgcaacttgtaatagtcttggttcccttttcctaccttttccacagtatatattgtttccttgatcatggcagagctttggaagactaccccagggaaggctctggctcttagtatcttttttttctccctctcttattcagcttctccagcaacccctggtgaagaaggttgaatttggaactgacacacttaacatttacttggatgaggtaggtattcaggaaccagatcaaagagctggattgcttacggatcttcatgacttcccttctaatctgtatatacgggtgtcacacacatggggatgaggggcctgggagtgagtccacaccatgccatgagttctgcctccatgctggtataccgtaaaacaccccattgtgcctctagaggagccctgtccaacagacctataatgtgagccgtttacgacatttgaagatttctggtagacatttaaaaagtatagaaacagatgaaattaagtttaacggtatattttatgcaagcttatacaccccaaatatttccattttaccatacaattaatatacagacgtattaatgagatatctacattctttttttttttctgtaccacatctttgaaatccagtatgtactttacactgtcagtgcatctcaattctgactgacctcatttcaagtgctcaatagccacaagtgacattgcaactctagagtatgttatagtggttaatagcagaagctctgaagccagactgcctgggctgtgatcttggttctagcattgactgagtaactggacaagctgttgaaagttagctgtaaaatgtgtgtgggtaggggtcaaaatagttcttttagagttatagaaaaaactaaattatttaagacatgtaaaaatatttagaactgtacctggtatagagtaagccctcatcactttatagctattcctatcattttaacataatgttaatattacttaatattaatcagacattgtatgtaacctttcattttaacaaaacaagaagttctcaaggactaacaatgttctaaagattgttacaatgttccttttcatgatattccattccacacaaggaacaaagttatccttattgaatataaccaaaagacaagaatatcccaaatcaaaacatactgttgttagtaacatccatttccaaccccctgcccacccaccaaccccatcatctaactgtgtttcctgtcttccagggagccagggttttttatgttgtgtgagccgtgtatagtttcttttttyttttttttttgagacgcagtctcgctctgtcacccaggctggagtgcagtggcacaatctcagctcactgtaagctctgcctcccgggttcatgccattctcctgcctcagcctcccgagtagctgggaccacatgcgcccgccaccatgcccggctaattttttgtatttttactagagacagggtttcaccgtgttagccaggatggtctcgatctcctgacctcgtgatccacccacctcggcctcccaaagtgttaggattacaggcgtaagccaccgcacccagccgagttgtgtatagtttcttttgagacagctcgggttagcttatctggcactaccctgtaatcatgatgttgctgtttaaaactttgccaagtttatgatgctttcatacatgacttattcaagtcttacagccaccctccttagacataaggagacagagttggagagagagagtgggttgtccaagtcataccatctgtcagtgtctagggtgggagcagaacctggggagtctgatttccatgacaccatgcctgagactgcaatgaactgctcctcagtgtgtcctgccaaatctgccagttggcttctaatttgagttaacaggcctaatgatctaaaagccagtgctaatcattgtatctgtggttatttcctcttttctgtgtgtcttctcccttgtgttcttgatcaatttcaccagaggatgaccttattcacatatatagtcttccttattttttgatgaacttacactataagcgtccctctaggtacatgccatccctctcccacaatctcagacaagmaatgtttttactgtcattcagttctaactatttcttaatttgttgggaaacacatggaatttttaaagccatccttttgttcctgatgtctaattttgttgcattatggtctgagaatacagtcttcatgatcctgattgcctggaatgtgctgaagtttcttccatgacctaatccatgatctgtttttgcaggtgttcagtgtgcactccaaaagaacatctatttcttttctcttgggcttggattctgatctagaagtctgagatcattatttctgttgttcatgtgtttgataactctgcttatttttctgcttgatttaacaatttctgaaaagcatgtgttaaaatatccaattatgatggtttttgtttgtttgtttagtatttttttggtagagacagcgtttcaccatgttggccaggctggtcttgaacttctgacctcaagtgatctgcctgcctaggcctcccaaagtgctggagttataggtgtgagccaccacgcctggcctctaattatgatatttgatttatccatttatccatacatttctgccaattgtttcctgatatatttgagactacataattagatatatatgttatgaacatatcttcttattaaattttccttatattagtacatactatcctttccccattactatatatgtgtatatatttatatcatttacttttgccttagattcttacactcccccaccgccacacacacacacacaatttttttcccttgccttgggtgccatttagtcagatattaaaactgctacctggccgggcgcagtggctcatgcctgtaatcccagcactttgggaggctgagacgggcagatcatgaggtcaggagatcaagaccatcctggctaacacagtgaaaccccgtctgtactaaaggtacaaaaagttagctgggcgtggtggcaggagcctgtagtcccagctactcaggtggctgaggcacaagaatggcgtgaacctgggaggcagagcttgcagtgagccgagattgcgccactgcactccagcctgggcaacggtgcaagactccatctcrgaaaaaagaaaaaaaaaaaaaaactgctaccccagctttcttttggttcatattagtcatttgctttaattcattatggtgaccaaatgatagaaaagaacagtggttctaaaaattctttgtttcagtgtccctttatactcttaatttactgaggacctcaaacagctttcggtgaagtgggttttaactattggtctttatcatattagaaattaaaactgagacaatcttaaaatatttattaattaatttaaaaatgataataaactcactacatcttaatataaataaaatttttgtgaaaataactattttctggccaggcgtggtggctcatgcctgtaatcccagcactttgggaggccgaggcgggtggatcacgagatcaggagttcgagatcaacctggccaatatggtgaaaccccatccatctctactgaaaacacaaaaattagctgggcatggttgtgcgtgccggtagtcccagctacttgagaggctgaggcagaagaatcgcctgaacctggcaggcagaggttgcggtgagccgagatcatgccactatactctagcctgggcaacagagtgagactccatctcaaaaaaaaaaaaaaagaaaaagaaaaagaaaataactattttccaaaacaaaaaaataagaatggtgacattgttttgcatttttgctttaatatctggcttaatcaaagagaatgaaattttcctatttactcctacattcaaaccgttgcaatattacacataaagtagcctctgataactctcctgtatacttgttttgttttttatttttttaaatcactttccccagaaggaaacaatctcctgtatatttgtaagagaatgagagtggaaaaaaaaagtcttaatatcattctaaaaataattctgacctctcagatattctgatgcaatctcggggatccctggagtaggggaggtccctcgaccacactttgagaagcactatacctgaagaactttggaaatcccttccaattaggcgttaatagcgctatatctaaatttataatacgatttttttttttttttgagacagggtctcactctgttgcccaggctggacttcagtggcccgatcttggctcactataatctccacctcctgggttcaaatgatccttccacctcagcttcccaagtagctaggatttatttttttatattaaagtaacttatacaattgccttagattctccatttgctaatttattcaacaaatatttactgaacaaccaacatatgccagtcacttttctaagtgatggagacgtagcaatgaaaacaatagatatgatacctggcctaagagtgctgatattctagtggagagacaacaatattcaggtttttaaaaattacatgtatatgtgtatacacacacattttttttcagtagtaataagtgctatgcagcataaggggataaagagtgctggtggggcaggccagggatgtgactctttttaaataaggtgttcaaggaaagcctctttgaggaggtatcatttgctcagggaccagattgaagaaagcaaaccagtaaggggcatagaactgttggagtaaaatgcaagcctctgtttctctggccactttgactaatttagtggagaagccatgggtcagggtggaccatgaacaaagggaaccagttcacaagagggccagagagctgtaagatcctaagaagaaagagccaggaagtcagcaggaggcaatgtctttaagactcatagggcagtagcggtacatagagggtttcagagaatctttttttaattaaaaaaaaaatttttttttaatttgagatggagtctcgctctgtcgcccaggctggagtgcagtggcgccatctcggctcactgcaacatctgcctcccaggttcaagcgattcttctgcctcagcctcctgagtagctgggattacaggtgccagccaccatgcccgactaatttttgtatttttagtagagatggggtttcaccatgttggccaggctggtctggaactcctgacctctggtgattcacccacttcggcctcccaaagtgctgggattagaggcatgagccaccgtgcctggcggggcttcagaaaatctacatgaagacagcaagggtcttttattccacattgcatacagtgtaattttcattttacttctaaggtactgtttcatctgtcttccccacagctcattaagaacrctcagacttacaccttcaccatcagccaaagtgtgctggtcaccaacttgaaaccagcaaccatcaaggtctatgactactacctaccaggtgagagggctgagctgaaatgagakctgagatcttacctgcatctcccaacttacttctgcctcattcttcatggcttctctcttaattttacaaatactccttcccaagccaagtagcacataattaaattatctaatctcctaaaatattttaattcagttgtgtgccatttttaagttgcgtacactagagacattttatrtgatcggagaacaatgtgaaccattgttctcraagggctatttctattatttttggtatgattaatagtttgtcacaatgtacaaatattagtgattgaarctttcttgtaattctgaatatgctcataacctgtagagattctctggaaggggctcaagcagtagcttttctgaagcattttycctctgaatataggaggccctcaaagtaataatatgwcttatttcatttcacagatgaacaggcaacaattcagtattctgatccctgtgaatgaggtaagtccagcggagaaatgggtggagttatgggttagggtggcagaagttaagaggagcctcttttcgagttactgtcattgtctttttttgagatagagtctcgcggtgttgcccaggctggagggcagtggcggaggttgagtggctcacttcccagcttcaagcgattctcctgcctcagcctcctgagttgctgggattataggcgcccaccatgatgcctggctaatttttgtatttttagtagagacagagtttcaccatgttgaccaggctggtctcgaactcctgacttcaggtgatctgcccacctcggcctcccaaagtgctgagattacaagcatgagccaccacactcagccctgttattgtcttttggaagctattgttgatagaaagtgagctttccttttttgtcttaaactttttttttttttttaaacaggatctggctctgttgcccaggctgyagtgcagtggcgtgatctcagctcactgcagcctctgcctcccaagttcaagcgattcttgtgcctcagcctcctgagtagctgggatgacaggcacgtgccatcacgcccagctaattttttttgtatttttaatagagatggggtttcgccatgttggtcaggctggtctcaaactcctggcctcaggtgatccgcctacttcagcctcccaaagtgctgggattacaggtgtaagccactgtgcccggcctgtcctaaactcttgaaaatagtttacagaagaaaaagctaatgcttggtattaaaacaatacttttttctatcagattgaaaatggattgatttttcctgatatttttacatgatacatctttgttatatgaaaatactaagacaaaagtaaaggttacctgattctacacctgtgagataacactattaataatccaactgtgcatttgtgagatttttttgtatatatakagagaggtcaagtatcctctatgtatgtaatgagcttctgagtatcacagtgtcttctattttttgtttgattgttcgcttttcaggataggagctggaaactcaattagtcctctgtgacatttactggagggtggaacattcttctgtcgcttgaagcagaactcattcaatcaaataatttaatttctctgactagtatatgggtaacaaatgaatatgtctgaacctcagctataatactttctactacctttgcaaggagatgggataggaacaatcactcagaggaggcgttgcatggrcagggtcatagggggaagaaaggtggtttagctgttttatttagccattcagggggctctccagagaggagacggtggtagagggtgaactagagaagataagaatgtcttcctaggccggatgcggtggctcacgcctgtaatcccagcactttgggattgcgaggtgggcggatcacttgaggtcaggagttcaagaccagcctggccaacatggtaaaacccgtctctactaacaatacaaagattagcctggtgtggtggcacgggcctgtaatcgcagccccttggaaggccaaggcaggagaatcgcctcaacactggaggtggaggttgcagtgagctgagattgtgccactgcactccagcctgggcaatgaggcaagaccctgtctcaaaaaataataaataataataataataatgtttttctagagtttcagtctaagggaaaatgtgatttagggctttggaaattggctaaaaaaataaaaatggaaaagaaaatctgtgcatttagttctatgcatatttctttggaaaccaaaagttcttttaaagatgatgatcatcctttcccccaaaactcacaatttggtttcttccttaaaccttttaacccagacttctcaaagaatcatcttaaagatgtgasgacaggttagaatagagaattttaattatggggctctgctcaaccagcccgctactgcagggcaaacagtgatggattacaagaaaagtggctggccagaatgccgtttccatctctctcggtttctcttctgcatgattctcccaacctctccccacrtgggctatctatcacctatcaccgtgcaagcacttcctcagaggaatgcttttgttttggaaacaggtttggaggcaaagggataagggaagtaagatgaatgatatttaacagaaaagattctctaggcaattacacccttttatcctgggtatccactggatccattatgctccccttgattgcaaattctgactgaaaagtcagggaaaataagtacattctacaaaaataaaaaatgacagatgggacctacttaaactaaagagcttctgcacagcaaaagaaactatcaacagagtaaacagacagcctaaagaataggagaaaatattaacaaactgcctccagcaaagaactaatatccagaatctataaggaacttaaacaaatcaacaagaaaaaaacaaataatcccattaaaacgtgggcaaggggcatgagcagacacttctcaaaagaagagtacaagtggccaataaacatatgaaaaaatgctaaccatcactaatcatcagagaaatgcaaaatcaaaaccacaatgagataccatccacactagttagaatggctattattaaagtcagaaaataakagatgttggcgaggtagcagagaaaagggaatgctaacacactgttggtgggaaggtaaattagttcagccactgtggaaagcagtttggagttttctcaaagaattaaaaatagaattaacattcaacccagcaatctcactactgggtatatacacaaaggaaatacatctttctaccaaaaggacacatgcacctgtatgtttttcgcagcactattcacaatagcaaagacatggaatcagcctagatgttcatcaatggtagagtggataaagaaaatgtggtcyatgtataccatggaatgctatgtagccataaaaaagaatgcaatcggcccagtgcggtggctcatacctgtaaacccagcactttgggaggccgaggtgggtggatcacctgaggtcaggacttcaagaccaacctggccaacatggcaaaaccccatctctactaaaaatacaaaaacctagcagggtgtggtggcaggtgcctataatcccagctactggggaggctgaggcaggagaattgcttgaacctgggaggtggaggttgcaatgagccgagatcatgccatcgcacttcagcctgggcgacaagagcaaaactccgtatctaaataaataaataaataaatagaatgtaatcatgtcctttgcagcagcatggatgcagctggaggccattatcctaagtgaattaatgcagaaacagaaaaccaaatactgcatgttctaacttttaagtgggagctaaacctgttgtacacatagacacaaagatagaaacaataaacactggagattccaaaagggagaagggaggaaagagggcaagagttgaaacctacattcaggtactatgttcactatttgggtaacgggatcactaactcaaaccacagcatcacgcaatatacccatgtaacaaaacctgcatatttaccccctgaatctaaacctgcatatgtatctcctgaatttaaaattgaaaaggccaggcatggtggctcactcctgtaatcccagcactttggtagtccaaggtgggtggatcgcttgagctctgagttcgagatcaacctaggcaacatggcaaaactccatctctaccaaaaatacaaaaattagccaggcatggtggcgtgttcctgtagtcccagctactccggaggctgaggtgggagaatcgcttgaacccaggaggaggaggttgcagtgagcctagtttgcaccactgcactccaacctgggtgatagggtgagaccttgtctcaaaaaaatagaataaaataaaataaataaaagcgtatactgaagagaatattcccccaagcccagggtcacagttgcattaattgttctgtacctttctcctccatccttgtgtctgtcctggtccttctaggagttcctatagtgagggcagatgggggaagatatgcaaaggaggtcattcccaagcttgcctcttgggtatcaaaggaagagagcagagggaactctaaagaaaagaaggtagttgtcaggtgcagcagctcacacctgtaatcccagcagttttggaggcttaggcgggcggatcactagagatcgggcattcaagatcagcctggctaacatggtgaaaccctgtccctactaaatatacaaaattagctgggcgtggtggcatgcgcctgtaatcccagctactcgggaggctgaggcaggagaatygcttgaacccgggaggcggaggttgcagtgagctgggattgcaccactgcactccagcctgggggacagagtgagacttggtgtccaaaaaaaaaaagaaggtagtcatgatcatgaaagccccttccactcactaaaagctccatcccatgtacattttgggtctgcagcacttaccagagcatcccctcttttggaacgaaaggaaatggtgatcctcaagacttaagaggttatgcgggcagaatacatcttaaatgattaggaaaactctttattcttgtatctttgggatttcagataggataaaaagaatattcttatgcttaaattatcaactacgctgaataaaaggatgttaatgagaacatgtacattgtccaactcattgaaatataaatatttgtgcatatttgagaaggtgattgtgaggattaggtggcatttagcattcaagtgacacttggtattacagtacttacagtaaatactgatacatacatttattatatgtcaggtattacaccaggcctgggaatacaaagataaataaaatgaagtttctcttctcaaaaagctcacagactagtggagggaggaaggaaacaaacaaattaacagttataatacagtgtgaccaaaaaaatgatagaagaaagcacaaaaagctacggaaggccaggtgtggtggctcatgyctgtaatcccagcaccttgggaggccgaggcaggcagatcacctgagatcaggagttcgagaccagcctggccaatatggtgaaacctcgtctgtagtaaaaatacaaaaaatcagccgagtgtggtggcaggtgcctataatcccagctaattgggaggctgaggcatgagaattgcttgcatctgagaggtggaggttgcagtgagcggagattgtagcactgcactccaggagcctgggcaacagagcaagactgtctaaaaaaaagaggtggggagaaagcacggtatttcacccaagtaattcagtgtactcatggattatgtgtgtgtatgtgtggggcggggtgggggcgtgggtagtgtctcctcaaagttagactgggaaacagagattggataatgacttgcttttcagaaagatcattctagcagtaatgtgaagaatggggtggagaagaagaaagccgaagtccttgaaaccatttaggagactgctacagttatccaggtaaaagctggtgaacggggagtgggagggggaggaggggacactcagcagctactcagcttagctgatagaatcaggaagacttactgacatcaaagacaaaacgtaccagacaattacacaggtggttttattcgggccattgcaatcaagaacacatgttcattaattaataacatctcagagaaaaggaaggggacctgaggtttcatagaggcagcaaacaaaagagtcatacatggatcttatgggagccataatgaaggatggagatgaggctttttatggaatatgtgtgagcagagtgattctttgcagttagcttttttgttggaacacaaaaggttggagggttttggaaaacaacacgatgggtaaatttcttaactgacctgttttacagaagcacagggytcaggtggttcaccagtgtcagagactaagtgaatgcaagaaaggagagtaagggaagaggctgggaagactgccagaattctagactgtggattacatacaggagaaaaaccttttcctctacctgttaggtttagtatacggggcctgcaaatgaaaccgagaaaagacagatgaaagggaaaggcttatttcacaagcatgtgacaacttcacagggaagaagtgaaaataagagaagcaatkaggaatgggggcttatatgccattttaacaaaggacaagttgtggaaacattaacaagaccaaggaagtgagatctgggcatttggggcagtaagttatgggaaggtaaatatatcggaggcactaatggaagataatrrccattttagtaagatttgtttacgcagattcaagttggtgctgactttctgtctcttgtcatataagttattctccttctcctgatatgggagagggggagagagacactttccttcataaggggaaatttatatcctgcttttaagtgtttcttaattgccttccagcacaaaatcctacttatgccaaagtggcacaatttggactggcatattttgatcccttttaactgggtggatggtgccatccatgcaggtacagatatagaaagagagaaaatagtgtgttcagtttactacattaagtttgagtggctgggtgtggtggctcacacctgtaatcacagcactttgggaggcygaggcgggtggatcacgaggtcaggagatcgagaccatcctggctaacacggtgaaaccccgtctstactaaaaatacaaaaaattagctgggtgtggtggtgggtgcctgtagtcccagctactcgggaggctgaggcaggagaatggcgtgaacctgggaggtggagcttgcagtgagccgagattgcgccactgcactccagcctgggcgacagagcgagactctgtctcaaaaaaaaaaaagaaaaaagtttgagaatgtgtaagtcctgatggtgaagatgttgagatagtgggatataaagggtcatgtcaaccattaaagaaagaaatctgaagataaagactggcagttagcagcaaataagtagtgagaagccaagagtgttgaggactagctagggaacaggaaatgagaagaggagagactgaaagggagtgccaacatttcaacagcaaaggaagagaagggacttcagaacccaggatctcaccaatatttcttcccataacaatggcctcttgaaggctttcccttctcctacctcccccttgaatccccgccttcatcaaggatttggtaggaagtggaaaggaaccagtatcagaaaagaatcctacttttttttctttctaagaatcctaccttaataagcaaaatatgtcacatttggagcacagagaactttctatccttcttcctgtagccctgttgaaatatttatcatatctcatccagactgttgcaaaaacccagttgctgccccttctatgtcagaacattcctccacccctatgtctattattttattttacatattctctatacacaaggctgcctctattcaactaacccttagaattgtgtcaggtgatgtactgccagctatttaaaatctgggccaggtgcagtggctcccacctgtagtcccagcactttgggaagttgaggaaggaggatcacttgagcccagaagttcaagaccagcctggacaacatagcaagacccaatctcattctttttaaaaaataaaatcctaatctgattatgacattcatttgcttaaaacccttcaggggctgttaggggtaaagttctattcctgttcatggcatagcagactttcatgactattttcttcctgccccctccccgccagctccatcttcggcctttgaccctcacacttcaggaacacggaacatttggttcccaatttccactaaaatctccgataactttcaaagatgctttctatcatgcttgaaaagcttttctctcttctgcttggaggacttccactggtccttcaaggaatggcctccaaggtgtgtttcctactctggcaaggcttccttaagagctctttgctcctacagcacctgtgattccagcggaggatttaccaagctgggttcctgttttctgttgaccctcccatctcccccatcagagtgtaagatctctggaargctggaccctgtgctgggtgcttccaactccccaccaccacaccccattatctattctctttatcactgacaaaaagtacaattttatttggagcagccacgtgcccaactaaaatcgtcaccttctcagaatcgcttgcagttaggtttggccatgtggcagaattccagcctacaaaaagtaaccggaagtccctggaaagtatttccttcttcttcttctctctctctctttttttttgagatggagtttcactcttgttgcccaggctggagtgcaatggcacgatcttggctcactgcaacctccacctcccrggttcaagagattctcctgcctcagcctcccaagtagctgggattacaggtgcccaccaccacgcctggctaatttttgtatttttactagagacggtgtttcaccatgttggtcaggctggtctcaaactcctgacctcaggtgatctgcccacctcggcctcccaaagtgctgggattataggttgagccaccatacctggcctgttttttatttttatttttaatttttgagacagagtctcattctgtcacccaggctggagtgcagtggcacgatcttggctcactgcaacctctgcctcccaggttcaagcgattctcccgcctcagcctccccagtagctgagactacaggcgcccgccaacacgcctggctaatttttgtatgtttagtagaggcagggtttcgccatgttaatcaggctggtcttgaactcctggcctcaagttatctgcctgccttggcctcccaaagtgctgggattacaggcgtgacccaccacacctggccctgttttttgaattctagccatcttagtgtgtgtgaagtggtatctcattgtggttggatatcctctgatgaaaaaggatctgttcaaggcttttgtttatgattctggattgactttcttttgaaattcttttttttattttttkwttttttttgttttktttttttttaactattttccttttttttaacttttatttgaggtttggggctacctgtgcaggtttgttacataggtaaacacgtgtcgcgggggttggttgtacagattatttcatcacctaggtattaagcccagtacccaatagttatcttttctgctcctctccctcctcctactatcctccgtcgagtagactccagtgtctgtttttcccttctttgtgttcataagttcttaccatttagctcccacttataaatgagaatgtgtgggaattggttttctttttcttttttttctttttttaagacgaagtctcactctgttgcccaagctggagtgtagtagcgcgatcttggctcactgcaacctccacttcttgggttcaagtgattctcctgtctcaggctgccaagtagctgggacaacaggcatgtgccaccgtgcccatgcaccaccatgcctggctaatttttgtatttttagtagagacgaggtttcactatgttggccaggctggtgggatttggttttctgtttctgcattagtttgctgagtataatggcctccagcttcatccatgttcccatgaaaaacatggtctcattcctttttatggctgcatagtattccgtggtttatatgtaccacattttctttatccaatctctcattgatggacatttaggttgattccatatctttgctattgtgaatagtgctgcaatgaacatttgcatgcatgygtctttatggtagaatgatttatattcctctgggtatatatccagtaatgggattgctggcttgtgaaattctttatatgtctagatcagaggactttgtgagattttcagacttgcaaaaagttcagaataaacttcagtaccgcaaatatcttcttcagtctatgggttgccttctcactctttcaataatgtcttttggtgaacaaaagttcttaattttaatatagttcaagtgagtgattttattattctatttaagaatcttgcctgggtgtggtggctcacatctgtattcctagcactttgggaggttgaggtgggaggattacttgaggccaggagtttgaaggcagctgtctctacaaaatcaaaatcaaaataaagagaaagaaatctttacttcagggtcaaaaaatgctttccttatgttttcaaataaaagctttttattttattttattttttttagaaaacagggtctcactctctcactctgtcacccaggttggagtacagtggtgcaatctcagctcattgcaacttctgcttcccgggctcaagcaatcctcccacctcagcctcctgaatagctgggaccacaggaggcacatgccaccacaccccgctaattttttgtattgttttgatagagttggggtttcagcatgttgcccagactggtctcgaactcctgagctcaagcaatctgcctgcctcggcctcccaaagggttgacattacaggcrtgagccactgcacccagctaaaagctgtttttgttttaattttatctgaaattgctttttgcgcatggtatgagctaggtcaagagactttgttttcctacatggatatttaatatggctcagatcatctattgaaagaccatccttttcccactacattacagcatgttgcttttatcataaataaggtagccatacatgggagagtttattcctggattctgttttgtcycattgtttacttcgcctatccttcaacaatatctcacacacacacacacacacacacacacacacacamtatagttttattatagttcttgattttgggtagtataatcctctagattttgtgattcttcttcaagatagccctagctattcttggcattttgaatttccatataaatttaaatcagtttgttaatttcctcaaaaaacctgctgggaatttgggaggattgctttggagctatagagttgaagatgactgacatctttataatattaagtttctaatttatgaacatgctctatcccttaagtattaagtccatcctcaatttctctcagcagtgttttgtagttttcagtgtagtgggtgttgcacatcttatattaaattaattcctaggcagttggttcttttgatgttatgtaaacaatttcagtaataacatctaatttcctatttattttgtatttggaccttgaatccagcaaccttgctaaatttgcttattgtcttggttttttccttaggttcttttaaattatctcagtacacaattgtgtggtccatgaacaatgacagcatagtggactctgtggcacggcacccagaaccaccccctttcaagacagaagcatttattccttcacttcctgggagtgttaacaactgatagctaccagttgtgcccgctctggacttttgcccatagtggcctatcctctgtgattatgcatttgtaactgtgttcttcctcttctgaagacatcagtcacattggattagccacccttatggctgcatttcaccttgattaccactttaaaggccctgtctccaaatacagtcacattgggggttatggctccaacatactcatttggaagccaggtgtggtggctcatgcctgtaatcccagcactttcggaggccaaggcaggaggattgcttgagcccaggagctagagatcagcctgggcaacacagggagactcatctctacaaaaaaatataaataaataaacaaaaaaatttaactgggtgtggtggtgcatacctgtagtctcagaaacttgggggctgaagtgggaggatcacttaagcccaggaggtcgagccaagatcacgccactgcagcactcaagcctgggcaacagagcaagaccctgtctcaaacaaaacaaaacgaaacaaaaaaaacaaaaaaacccatataaattttggggaacacatttcagttcataataaagtggaaaaattaaaagaaattaaatttacagtttaaagttatgctagaatagacatgaagtagcccccctgaaataagagttaagaaagaatattaactgctcctctgtaaggtctgtgaagcattaaccatatctctcccccacatattttgtaagttctgtaagctcctgtttttcttgctgtgcagctgcaaagtcacaagatagataagcatgagtcgcaagacatgttttcccaagatgtaagctgagtcctaagaatgtcacctgataattaactgctttgttctcgcttttgtaaaccagcttcctgcatcatataattcccacctcaaagtgcataaaagacattcattttctttgtttgctgctcagactttcaagatgcatgtccgctgagctagtgtacacttaaaataytccctcctgaactccgcttagtctctccagtctctgatttcccactacaataacacatccctgaagagattttggtttgaccaatcaaaaataataattgtgttttctgtgacgcaaacataaggaaacctatagactcaaacattttttattgcctacctcctaaaataattttttaaaataatttttaaaaagcatacattcttttgcatatttttggtcaacatttaatttttttttttttaagacagtgtctctgtcacccacgctggagtgcaatggtgcaatcatggctcagtgtagcctcaacatcccaggctcaagctatcctcctgcctcagactcccgagtacttgaaactacaggtgtttgccaccacaccaggctaatttttgcattttttgtagagacaaggtttcrccatgttgcccaggctggtctcaaactcctgggctcaagcaatcatcccatgtcagcctcccaaagtgctggaattactggtgtgagccaccatgcctagccttcatccacttttatcagagaattttatttaatatgtttttatgcttaaaagttttattgatcatcttatcagagtttctgccataaaaatatgtctataacttcagatatcaaaacatttttattttataaggctcaaatatattcaaggcttcttgtggattgagttaacatcacaattagacatattggatcaaaacagcacacatttttaaaataagaagttaaaaaatatcacttcttttgttttgagacggagtcttgctctgttgcccaggttggagtgcagtggtgtaatctcrgctcactgcaayctccgcctccggggttcaagcaattatcctgcctcagcctctctagtagttgggattacaggtgcgtgccaccacacccagttaatttttgtatttttagcagagagggggtttcactacattggccaggctggtctcaaactcctgacctcaagtgatcctcccgccttgccttccaaaatgctgggattacaggcatgagccactgcacctggccaaaaaatattacacataataaaaagtaaaaactagaagcacattttctaatgacatgaatgtggttgggatttttttcaattatccaataatatattagtgcatacattcacagatgattattgcttatttctttttttctttttttgacatggagtctcactctgtcccccaggctggagtgcagtggcacaatctcagctcactgccacctccacctcctgggttcaagtgattctcctgcctctgcctcctgagtagctgggactacaggcgcctgccaccacgcctggctaatttttgtatttttaatagagatggggtttcaccatgttggccaggctggtctcgaactcctgacctcaagtgatctgcccaccaaagtgccgggattacaggtgtgggccaccatgcctggcccataatttgcttatttctagaatgagacaagaatcaagattaattgtattccaatttttaatttcttcaggtatattatttgagaaatctcactcatataaataagagtagaaggcatttagctttagcaatgccagtgaattttgtgaactctttcaagttatataccaaaaccttataataatctttcatcaaaaactgattyatcagcactcaacttgattagatgctcctttaatttggttgaaagaattataaatcttgacttccaaaaagatttttcatgaaagtactttatctacacaaagtgacaatatttcaaattatctttggtggtcaagagggggtatgtgtgtgtgtgtgtgtatgtgtgtgccctagaacagcataccatggaaggaatgagagttgcagtaaccttttgtaaagtgagcagggagaggggaaagaagatgctttgacacgtagagaacattcttggtgaagtgtcaagatggagactgcatctggaagtcaaaatctggaaatttcagccctgtccatgttggaaaggctttgtacaccccagagatacatgtactccagtttgaaaattgctgatgtagtgtgtatctagtgtcaatcagcckgtgttcaaataacagctctacatcttgctagctgaatgactttgggcaatttatttagcctaactatacctcagtttcctccttggtaaaatgggagtgataatacctcaaagagtggtagtgaagataaaattatctacgtaaagtacttaaaactgatagggaggaagggagggattgcaaattagcacaagaaagctttgggggtgatatgttccattatcttgattatggtgatagtttcatggttgaatacatgttaatattcatcagattgtacactaaatatgtgctgttattgtataccaattttaccttaggaatgctgtattaaacctgggcacagtggctcacgcctgtaatcccagcactttgggaggctgatgcaggcggatcactttgagctcaggagttcgagaccagtctggccaacatgatgaaaccccatctctactaaaaatataaaaattagcctggagtggtggtgcacacctgtaatctcagctacttgggaggcaggagatttgcttgaacctgggaggcgggggttgcagtgagctgagatcacgccactgcactccagcctaggtaaaaaagcaagactccgtctcaaaaaaaaaaaaaaaagaaaagaaaaaaagaagaatgctgttttaaaatctttcattttttatttttaaaaaatagggacagggtttcaccgtgttgcccaggcttttctcaaactcctagacttaagctgtccactggctgcagccttccaaagtcctcggattacaggcttgagactctgtgcccggcctgttttaaaaatcttaattggcatttaatatatattcaataaatattagctattattgtgaagagagattctggacctttcttgccaggaggtaaaatttccactctcaatgtaggcccctgttgtttcactgggacctttctcccctctctacagctttccccttccccagccccaggaaaggtggaggcgccaccttctggtcakaaakgagattacacaatggtgtcctgcttttaaactttttgttttgttttagcatttattttcgaatagacaatacacgcccacgtaaaaattcaaaggtcctaagagacaccttccacatttcttctctcagttccctcctcggatgtaacctatactattacttttgccaaatgtcagcgccctgaaatacaccacccgaaatctcacagataggcaaagctggagtttattcatgtcttagcaagggagcacaccgccttgcggaaacttgagcagcatctgggaggggagggcaaagggaggatatttatgaggytctaggttggattaaggtgggtctttcagtgaagggctctgattaagtttgggtacggatcatgatttagcaaggtgagggcttaaaaaagttttggagcatgaataatcatttgataactgtactggaaagctaagcaatttaaaatacgttgtctggatattcctgaaatgaacaataacattatttaaaagttttattttaaaaagttttttcagttaaaaaaaattaaaggcataagtatgatacaaaggactttggggacttgggcggaaagggtgggaagggagagaggaataaaaaactacaaattgggttcagtgtayastgctcgggtgatgggtgcaccaaaatctcacaaatcaccactaaagaacttactcatgtaaccaaataccacctgtgccccaataacctatggaaataaaaagtttttaaaaatttcattttgtgagtgcagagtaggtatatgggatacatgagatrttttgatacaggcgtgtgatgtgtaataatcacatccgggtaaatgggatatctatgacctcaagcatttatcctttgtgttacaaacaatacaattaggccaggtacagtggctcacgcctgtaatcccaggacttttgggaggctgaagtgggtagatcacttgaggtcaggagttggagaccagcctggccaacatggcaaaaccccatctctgctgaacatacaaaaagtaggcgggcgtggtggcgggcgcctgtaattccagctactcaggaggctgaggcaggagaattgcttgaacctgggaggcagaggttgcagtgagccaagactgagccactgcactccagcctgggtgacagagtgagactctgtttcaagaaaaaataataatacaattgtacttttagttattttaaaatgcacactaaattattattgattagagtcactctgttgtgctatcaaatactacattttattcattctatttttttgtacccattacccattcccattacagcttttatttttggggcaagggcttcctgaaatactaaagtcttgttggtaaagacagtagaatagcaaagtcaagctaatgtaggcagtaaagtgtgtgggtggggcttggctaattctcagtttctggtatatcttttcagagatattctgtgcttattcaactatacatgtataaatttcttttattattatttttatctttttatttttttttgagacagagtcttgctctgtcacccaggctggagtgcagtggcacgatctcggctcagtgcaacctccgcctcccaggttcaagtgattcttctatctcagcctcccaagtagttgggattataggctcccaccaccaagcccagacaacttttttgtatttttagtagagacagggtttcaccatgttggccaggctggtctcaaactcctgacctcaagtgatcctcccctctcggcctcccaaagtgctgggattacaggtgtgagccaccgtgcccagcctatacatgtataaatttaagaaatgtgatattttcccctttaccagttgttgcagaaatccagaaactgagtatgagatattccttaaataatggcgatccaacagcgtttgctctgtggtgatatgtgatgtactttcccaaagtacgtatatttacgtattttgtgttgaatggaattaccgtttgaggtattctagtgttttccctctcagcaatttatctaacagattatggttttggcaaaatctgtggggcacattttcttattcctggtttcctcttttccatcacaaagcagagtacagggctgagtggcaggggacagaaataattattccataagcactgaaatctgaaggccagcagaggggccttcattaagtgcgaatctgttgggcacccactgagtagtgaacaggatgaatgtgacaaccacactccctgcccttcccaggcttgcagcttagtgagggagagcaacactrcctgcccttcattagggggatgaatgtgacaaagcacagtcaggttgtgggaacctaacctaatctttgggctgaattaagaattcccagaagtgacactcaagttgcaagatgaagaataarcaggaatgagacaggtgaggggtgcggtgtgggaggattgttcttgtaaggggagatagcctatgccttctctggaactgagattacttttctccgtgtttctggtttctgtgttccgccatttgttctgtacatcttgtggtctgctttccagatttttttttttttttttttttttgagacggagtctcactctgtcccccagtctggggtgcaggggcgcaatatcggctcactgcaagctccgcctcctgggttcacgccattctcctgcctcagcctcccaagtagctgggactacagtcacccgccaccacgcccggctaattttttgtatttttagtagagatggggtttcaccgtggtctcgatctcctgacctcatgatccgcccgcctcggcctcccaaagtgctgggattacaagcgtgagccactgcgcccagctttccagatattttgaataggaatgtacacatagactttccaagtgaggaagtcaccatcctaaatgcataagaatccatcctatgactaaagtccctcatcagcgagagcctctcatgttagtggtcctagggagacaagaccctgtaccttttttagttctcaggagatggagtgaagactattttctgcactcttgataaagttcaagaaatgcccatcattggcagaaaatagaattagaatttcttagaattggaaatgtctttagaaatcatgcaatcaggtctcttcaactgaaaaatgaggaaaataagacccaaagtgcagaattcctttctaaaaattttaattattttaaaattattattactttatttatttatttattttttgagatggagtttcactcttgttgcccaggctggagtacaatggtgtgatctcagctcatcagctcactgcaacctccacctcccgggttcaggagattctcctgcctcagcctcctgagtagctgggattacaggcgcacaccaccacgcccagctaatttttttgtatttttagtagagacagggtttcaccatgttagccaggatggtctcgatctcctgacctcctgatccgcctgcctcggcctcccaaagtgctgggattacaggcgtgagccactgtgcccagcttatgatgtcaaattttagatgtcaacttaaaaatatatcaggggcacatttaaagtattttattttgatatacactttaatattaaaaaattaattttgcaaatggtgattctctgaattctcatgttaactcttaaaattttatttcctttaggggaaatacattacaaaccacaaagcttcatcttaaaacatagagatgctatagaaatggatgacatttacttagctctctctctttcccattgtgaccacaaaaatgtcaacaaatagacaagagacctacacaaatgtctatgctaagcagcagatttatcactcacagccacaatttctaactctggctttccttgctgggaagttttttgttgttttgggttttttagattactttagaaaaccatttattaaaggaagagtgtttaaacattaatttaggttaatataaagagtgtagccactccctagatctagaaatagattgccagcaacccagagctcatacgtaccaattcccaatcaaacccccttcccagcccccagaggaaactactacattgacattaaaagtaataacttctttgctttactttctggttataatacccatgtatgcctttccaaacatcgaagtttagttctgtctggctttgaacttgatataaatgaacaagtatttcagacagcatgtattcttttgtctgggcttccattacttaataattaggtttttgagattcatatatattgttgcctatagctatacttcatttattttcactatagtgtcgaatttttagcattgtatgaacagatgacaatgtagccattttattgctgataaacagttgctgctgggaacatccttgtacatgactccaagtggamacaagcacacattcataagagtgagatgactgggtcacaaatagttgaatcttaaattttactagataatgtcaaaygcttttaactcttggcactatcacattttaaaatttcagctaatttggaacatgtgtaatggtattatatttcattatgtttttatttgcacttctacctaatttgattactaatgaggttgagggatttttctacatttttgactatttggatatcatattttgcttgagtcctttgcccatttttctyttgggttctcygattttttttcttttctttctttcttttctttttttttttttttttttttttttttgagagagagtctgactctgtcacccaggctggagtgcagtggtacaatctcagctcactgcaacctctgcctcccgggttcaagcaattctcatgcctcagcctgtagctgggattacaggcatgcgccaccacacccggctaatttttgtgtttttagtagagatggggtttccctgtgttggccaggctggtcycaaactcccaacctcaggtgatctgcccaccttggcatcccaaaatgctgggtttacaggcgtgagccattgcacctggcctaggagttcttatatattstagatatgagcttctttgggttacatgacttacacaaattttttttttyctactttgtggcttgccacaaagcaaaactcaaaatgttttccacagccattcttccattttaaattcctaccagcagtatataacagtcctgattaatccacatcctcaccaacacttgttattgtttttctttttgattctagacatcctcgttggtgtaaggaggaatctcattgtggttttgattgacatttgtagcttgccttttaatggtgccttaataaataaatattttcaactttaatgctcaaaacaacaatcttttcccttattgttagtatattttatgacttgcttaagaactccttccttactgcaaggtcatgaagatagttttctgtattatctttcagaggttttatttatatatttagacagactcttgttctgtcatccaggctggagtctagtggcacaatcttggctcacagcaacctctgcctcctgagttcaagtgaatcttgtgcctcagcctcccgagtagctgggactacaggtgcaggccaccacgcccagctaatttttttttgaatttttagtagagacgaggtttcaccacgttgaccaggctggtcttgaactcctgaactcaattgatccacccaccttggcctcccaaagtgctgggattataggcgtgagccaccatgcccagcccacttttatctatttatcaccatacatattagtttctctctcctttacatatgcaaaataccccacaaagagagacaaccctcaagtcctgtccagttacagcattaagctcaaagttcagaatctctaggtgatatgtgatagcccctatatttgggaatgatgtgaggcagtgcttgcaccacgttcagacgtggccgttttgatctggagacgtacgaactaaaaagacaagatatctgtgcctcgtctcccaccaatgtacaatggtggaatggggccaggaaaaccctcccattaggaaagggaaatacaaagcattctgtagaaattctagacaaatgagcaaagggtttcttaccctagggatgaggaatttcctaatcaggtcccagtttgtcccccaggaagggttcaccagttggtgttctctgtgcctatcactccaccctctggaagatcttccttggtcatatctaaagagggttgctgaggaggaaaaaggtttttcctctcctctcctagggttttgctgtgttggcctaactcctgacctcaggtgatccacccgcctcggcctcccaaagagctgggattacagatgtgagccaccatgcccggccccaggttttattttataagtttaatgtggcaaaacgtgggggtgatccacagagaagagaaactccccgaagaggcagcgaggcttgggggtttttatgccatttagaggaaggacaacaaatttatagagaagtaacaaggcaaaggaagggggtttctaactttctagttctaggaggtagtaaattgtggggaggtaaatatatgggaaatactaatgggagattagggctagttagtaaggtttattcatgtagacacttacgtcatctctctcttgccatttccatctctggtaataagggctgttcttcccttcctgatatgggaaagggggcggtcgcctgcacaaggagaatatatgccctcttttcatatagggagggtagggagcttgtcctgtgtttggtttttctgaattgctttcagctcaaaataattcttatgccagagtggcatatactttcctgcaggaaactgaactactgagcaggtttgacaacttgctcattgcctgtagtagactaagtgcttagaagtcgtttttcagtctcaagtagtcatacacagttaagctataaactaagttcctcccaaagttagctcaacctacacccagagattaagaagggcagcttggaggttagaaccaagatggagaccaggcggtggctcacatctgtaatcccagcactttgggaggccagcctgggaagatcccttgagcccaggagttcaagaccagcctgggcaacatagtgaaaccctatccctacaaaaaataaaaaaagattagccaggtgtggtggtgcatgcctgtaccccaactactagggatgctgaggtgggaggattgcttgaacttgggaggtagaggctgcagtgagccgagatcacgccctggacaatagggcgagaccctgtctcaaaaaaaaaaaaaaaccaaacgaattttttaaaaataagaattttaaaagaaaaagacaactataaaaattttaagggttacacaataagtcatctaacactggccaggcgcagtggctcgtgcctgtaatcctagcactttgggaggccatatgcctcctattctactactgaggtcaggagtttgagaccagcctggccaacatggtgaaaccctgtctctactaaaaatacaaaattagtcgggcatggtggctagcacgtgcctgtaatcccagctactcaggagatggaggcagtggaattgcttgaacccaggaggcagaggttgcagtgagccgagatcatgccacggcattccagcctgggtgacagagtaagactccgccccgccgggcgcggtggctcacacctgtaatcccagcactttgggaaaccaaggtgggcagatgaccaggtcaagagattgagaccatcctggccaacatggtgaaaccctgtctctcctaaaaatacaaaattagccaggcgtggtggtgcatgcccataatcccagctactcaggagtctgaggcaggagaatcgcttgaacctgggaggcgggagttgtggtgagccgagattgcgccattgcactccagcctgggcgacaagagtgaaattccatctcaaaaaaaaaaaaaaatgatagctctagatatcctcttataggataatctctaaagtttattcttaggccaaaaactttggaggtaccctgttttttctctttttctcacatcccacatgcaccgtgtctccaaatcctgttgactcgcttcaaaatatattccgaatccaactacttctcaccacttctattgttactcctctggtctactgcaacagcctcctaacatttacttgcttccatccttgtctctcaggcctattcttaacacagcagccacagtgatgatgttaaaatgtaagtcaaaccacattactgctctattcaaatccttccaacagttcccagtcgcaataaaagctgtaagggtaaaaaagtgtgatatatttcctcacccatcataagggttgtggctggcactcctataataaaagacaggttaataagagaaaagcataacaaaygtacttcatcaaagttttaggtgacaccagtgtcttcagaaatgaagaccaaaagacccagagaacactgtgtctctgtgcttaggtctgatgaagaatgggcagcggtgtaggaatgtgattggacaaaagggtatgatctaatggtaatggactaagcggggaaacccagcaaggtctctctgttcagatccttcttggcctctctgtgcagcattctttcctcctgggtttggggcaggacccttctggagtgagggtcttcaatggacaacagagaaagtgacctttctaggttttatggcttgtttgtggggagagaagttctagtttctctgaccaaccttggggaagaggaattatggtttctgtgactcctcaggggagaaagagaggtgagagacaggagggcaggagaaggtcagagactttgcttctgaggctttttagtctctaaagtactcagcatgccaaagcgccatactttggggtatcattttctgagctccaacaaagctaaagtcagtttttataattgttatttgctctcttcctccccgttctcctctcccctggcactcccacactttgttataactctgaccttacttccagctcctctattcctagctcactgtattcgcccattttcatgctgccgacaaagacatacctgagactgggaagaaaaaagaggtttaaatggacttacagttccacatggccggggaggcctcagaatcatgacgagaggcaaaaggcacttcctacatggcagtggaagagaaaaatgaggaagaagcaaaagcagaaccccttgataaacctatcagatctcacgagacttattcaccatcatcagaatatcatgggaaagatgggcccccatgattcaatgacctccccctgggtccctcccacaacacgtgggaattctgggagatacaattcaggttgatatttgggtggggacacagcaaaaccccatatcatcctgcccctggcccctccaaatctcatgtcctcacatttcaaaaccaatcatgccttcccaacagtccctcaaagccttaactcatttcagcatttcttttttttttcgagatggagtttcactcttattgcccaagctggagtgcaatggcgcgatctcggctcactgcaacctccgcctcccaggttcaagcaattctcctgcctcagcctccctagcagctgggattacaggcatgtgccaccatgcctggctaattttgtatttttagtagagccggggtttctccacgttggtcaggctggtctcgaactcccgacctcaggtgatccgcccgcctcggcctcccaaagtgctgggattacaggcatgagccaccgcgcccggccctcatttcagcattaaccccaaagtccacagtccaaagtgtcatccaagacaaggcaagtcccttctgcctatgagcctgtaaaatcaaaagcaaactagttacattctagatacaactggtatacaggtattgggtaaatacagccattccaaatgggagaaattggccaaaacaaaggagttacagggcccatgcaagtccgaaatccagtagagcagtcaaattttaaagctcccaaatgatctcctttgactccaggtctcatatccaggtcatgctgatgcaagaggtgggttctcacggtcttgggcagctctactcctgtggctttgcagggtacagcctccctcctggctgctttcacgagctggcattgagtgtctgcaacttttccatgtgcctggtgcaagctgtcagtggaactaccattctggggtccggaggacggtggcccacttctcatagctccattaggtggtgtcccagtaaggactgtgtggaggctccaaccccacatttcccttctgcactgccctagcagaggttcttcatgagggccccacccctgcagcaaacttttgcctgggcatccaggcatttccatacatcttctgaaatctaggcggaggttcctaaacctcaattcttttttttttttttttcgagatggagagtcgctgtatcacccaggctggagtgcagtggcgcgatctcagctcactgcaacctccgcctcccaggttcaagcgattcttctgtctcagcctcctgagtagctgggactacaggcatgtgccaccacgcccagctaatttttgtatttgtagtagagacagggtttcaccatattggccaggctggtctcgaactcctgacctcatgatctgcctgcctcggcctcccaaagcactgggattacaggcgtgagccactgtgcccggcccccaaacctcaattcttgacttctgtgcacctgcaggctcaacaccacatggaagctgccaaggcttggggtttccaccctctgaagccacagcctgagctgtacgttggcccctttcagccatggctggagtggctgggacacagtgcaccaagtccctagactgcacacagcatggggaccctgcacctggcccacgaaaccactttttcctcctgggcctctggacctgtgatgggagggacttccgtgaaggtctctgacatggcctggagacattttccccatggtcttggggattaacattaggcttcttgctacttatgcaagtttctgcagctggcttgggtttttcttttctatcacatagtcaggctgcaaattttccaaacttttatgctctgcttcccttataaaattgaatgcctttaagtgcacccaagtcacctcttggatgctttgctgtttagaaatttcttctgtcagataccctaaatcatctctctgaagttcaaaattccacagatctctagggcaggggcaaaatgctgcccatctctttgctaaaacataacaagaatcacctttgctccagttcccaacaagttcctcatctccatctgagacgacttcagcatggattttttttttgttttttgttttttgagatggagtttcactcttgttgcccaggctggagtgaaatggcacgatcttggctcaccgcaacctccgcctcctggattcaagtgattctcctgcctcagcctcccaagtagctgggattacaggcatgtgccaccacgcccagctaattttgtatttttagtagagacggggtttcttcatgttggtcaggctggtcttgaactcccgacctcagtgatctgtccacctgggcctcccgaagtgctgggattacaggcgtgagccactgcatccggcctcagcctggattttattgcctatatcgctatcagcattttgggcaaagccgttcaagtctctaggaagttccaaactttcccacattttcttgtcttctcctgagcccttcaaactgttccaatctctgcttgttacccagttcctaagtcacttccaaattttcaggtatctttttcagcaatgccccattctattggtatcaatttactgtattagtctgttttcatgctgctgataaacacatacctgagactgggaagaaaaggaagtttaattggacttacagtttcacatggctggggaggccacagaatcatgaccagaggcaaaaggcactccttatatggcagtggaagagaaaatgaggaagaagcaaaagcggaaaccctttataaacccatcagatcttgtgagacttattcactatcacgagaatatcatgggaaagacgggcccccgtgattcaattacttccccttgtgtccctcccacaacaagtgggaattctgtttttttttttttgaaacggagttttgctcttgttgcccaggctggagcaatcttggttcactgcaacctccacctcctgggttcaagcaattccccttcctcagcctcccgagtagctggaattacaggcacctgtcaccacgccctgctaattttttttttttttttttttttttggtatttttagtagagatggggtttccccatgttggctgggctggtctcaaactcctgacctcagttgatccacccactttggcctcccaaagtgttgggattacaggtttgagccaccacgcccagcccacacgtgggaattctggaagatacaatgcaagttgagatttgggtggggacacagctaaaccatctcactcactctggtccaggcacactctgcttgctgttctaacacaccgggcacacaatcctccacctggagcagatacacacatgccccctctcttgttccctttacatctcttcataaatgccactttctctgtgaagtcttccctgaccactctgttaaaattctaagccccatcttccaattctcctgacatttttccattaaaaaaatgttcccatagcagttctcatcatgcgaattcccatggattttagattttactgatttgtttgttttctcccccactacaatgtgaactccatgagggtaaacattttgtctgttttgtctactgatggccacccatgacagaaaaaaaagtgactgtcttaggggaggccctcaatgtatttttgttgaatattgaataaatggrtgactcagatgtagggggtgatctaaagagaagagtcaagaatgacttcaacgttttttgcttgggcaattgggattgccactttccaaatcagggaagtctaagggaggagcaggtttgctgaaggtgtgatgactggctatctccagtgtcgtcaagaaaaagaactgaggcagagtgcactgatggggtgatccattttctcggactctggcaactctaacagtttccttagtcagatttacagttgccacagatatcctctgaaagttggaaaaggaagaggttaccaggtgttctttcagttcaatactgggcttgtgtctttgattgattcccatcaattcagtcacttcacaagtcagaagaggcagagattaactcatagctgcaactggctgctgtctggtggtggaaaggataatcctgaaggttatgtttcatggtcctataggacattaaccacttttgtatccaatacagcaatctcactaacattcctttgttaaattgcctagaaacacccatgcttctcaaacgcactttgaactgattttgatatcttatagattctttcattaattaataagttgtataaaatctttgacgtgttcgttttatatttgcatgagttatgattctagctttttgaaaattatattttaatatcacttttacagaactaaaatgctgccactcaaaatgatacctgagtacttacccattgattagtccaaccctgtgacaacatgaatttccctgttgccagcgcactaatacagttggcaaccggctaaacttcaggcagcagagaacgttcagctgcttgctgctttttgaaaaataaataaagggcttcagattatgccaccccaaaatatgttgttttggcatattcatttgagctgaagacactggagaaacagctgatgcaggaaaagctctctgattctccctttctacctgaaagcaggtcatacaattttccatgagaaacatgccctctgtgtacaaggaagagaacattcttatcaccatagaaagggaactgacactgaaatagatctatgcaaatagtcttactaaaataacctttaacttccactggttccccctttatatttcctagtcactgtcccacaatttactgccattacaccaagcccctttgttttgtcacatccccataatttataattctttgtgtaaaaaggtatacagtagttccttggtatccacagggtattggttctagttgccaccccctgcatatacaaaaatctgaggatgttcttatataaaatgacatagtatttgcatacaagttatgcacatcttcctgtatacattttttttatcttatttttttttgagagagggtcttgctgtcacccaggctgggttgcagtggagtgatcttggctcactgcaacttctgtttcctgggttcccgtgattcttgtgcctcagcctgtagctgggattgcaggcgtgcattatcacacctggctaatttttgtatttttagtagaggcggggtttcaccagttggctaggctggtcttgaactcctggccttaagcaatccacctgccttggcctcccaaagtgctgggattataggcatgagtcactgcacctggccctcctgtatacttcaaatcatctctagatcacttatacctaatataatgtaaatgctgtgtaagttgttgttatagtgaattggttttttataaatttgtatttttttctttctttcttttttcttttttttttttttgagacggagtttcactcttgttgyccaggctgcagtgcaatggcacgatctcactcaccgcaacctctgcctccsaggttcaagcaattgcctctttgggtcttttcttttttttcttgagacagagtctctctccgtcatccaggctggaatgcagtggcgctgttaacggtggaaggtatgcggacaattctgaaggcatttctatttttattctgccaataattttaaagctagcttgttaagttacactttaagtcacgtgaacttgaaaattgcttagacttatttacttgatttatgagcgcacttttacttataagccaatttggtagacacaacatataacagtaagtgtacaaacaaataaacacatctagacatgtatacacatacatcaacgaagatccaataccttggaaccttagccacgagatagcaatacaagcttgcggttttacttcaacctaatagaaaatacaaggacggctctgaaccaaaatttcaggtaaagcagcctccatggcagttcgatattgaagggctaaagcctcccagcctccctagacttcaaggagcaccggggccaaacagtaccaaaggagggtgtcacatgttaaccaggccccctgcttagaacagcagcacaaaagcctggatacatgcaacgccatcccactttctgattagacagtaaatttcagattctaaacaattttggggccaagcagcatcacaactgtgaaaaaattttttttttcttttctgagaccgaatttggctctgtcacccaggctggagtgcagtggtgtgatctcggctcactgcaacctccgcctaccaggtttgagcgattctcttgcctcagtctcctgagtagctgggactacaggcatgcgccactacgcctggctgaattttttgtatttttagtagagacagggtttcactatgttggtcagtctggtctcaaactcctgacctcaaatgatccgcctgccttgggctcttaaagtgctgggattacaggcatgagccactgtgcccggtctgcaagagaaaattctaaggagggtttaatactagacctcagaacctctgccaacagcttcctctttggagagtttgaggtccgcagaacccacagagcatcctcctgtggaatccaatcttagagttccagacatcactggccttaggtgggtgcatcaaatgcaggttttccttccaaagcatactatgagatttataagaatagccaagaactgtaatgagaactggatgccgggtgagacttttgttccttagccagtagagtacgacctgggaagaatttagcatatgaaaaggaggtttaagttgcctgaaatatgtgcaagtttgctctgagccgcacagcaggtagagatcatggaccatgcgtggaaaatattttttttaaaaagtccttcccactttggggcaggggtaattattcccattcgctcctcggccttcaggcagtaccagggagtgaccccagacaattgccctcaatttcaaggagctactaagaaacagccactgtaagactgaaagagaagaaaaaaacataaataaagacccagattccttaagtgatctgggcagtggcggttaggcttctccacatggaaaccccttagtttcactggccacggccagaaacctgcagttgcttccatgtttaggcacggtccaccaagcrtcccaagttggaaagtcccaaggtctgctccatggatggagcaggaaggaaagggaaaatgaatcccaaactttgggcttacttctccctcctggctggcttgccaaaatatgttaayrgtggaggatatctaagttcttggcatcttgaacaaagaattggacaaaatgcacaaacaaagcaaggaaggaatgaaagattttattgaaaatgaaagtacactccacagtatgggaaagggcctgagcagagggactcaggcactgttaaagagtttttctgagtttaaataccctctactcagggtatgtcctatgtaaatgaagaggataaagttacaaagtcatttatggcaaacgccagatggagaggctatttcctgttttagcttaagtgtgaattggccttaygctccctgcctccagaccctattttcctgcctcagcacaatctcagctcacygtaaccatctcccaggttcaggtgattctcctgcctcagcctcccgagtaactgggatcacaggcatgaacaaccacgcccagctaatttttgtatttttagtagagatggggtttcaccatgttggccaggttggtctcgaactcttgacctcaggtgatccrcccaccttggcctcccaaaatgccaggattataggtgtgagccactgctctggcctctttgggtcttacattttccttctgaagtctcccacgtacatgtaaatatattaaatgcatttatatccttttttcttcttaatctgttattttgtttagtattattattattttgagacggggtcttgctctgtgcccaggctggagtacaatggcgcgatctcagctcactgcaacctccacctccggggctaaagtgattctcctgcctcagcctcccaagcagctgggattagaggtgcctgcaaccatgcccggctaatttttgtatttttactagagatggggtttcaccatgttggccaggctggtctcgaactcctgayctcgtgatccacccacctcagcctcccaaagtgttgtgactacaggcgtgagccaccgtgcccggcctgtttttttcttttctgtgtgtgtgacggagtctcactgcccaggctggagtgcagtgacacaatctaggctcgctgcaacctctgcctccctggttcaagagattctcctgcttcagcctcccgagtagctggaactacaggcacgcgccaccgcgcccagctaatttttgtatttttagtggagacagggtttcaccatgttgcccaggctggtcttgaactcctgacctcaggtgatccacccgcctcggcttcccaatgtgctgggattacagacatgacccactgtgcccggccttaatctattttatcatgattctggttcactgcaaccgccgcacctcttgggttctcagcctccctagtagctgggattagctaatttgtcagtttaattcttaaaccagctgcagaacctaagagagtagaaggaagttttcctckcctacactaggttgtatgttagttttctgttgccactggtaatgatttgggacacaacaataagccacaaatttagtggcttaaaacaacacaaatgtattatttcacagttctgtaggtcagaagtctgacatgtggcggtggctaacgcctcccaaatcccaacactttgggaggcagaggagggcagatcacctgaggtcaggattttgagaccagtctgaccaacatggagaaaccccgtttctactaaaaatacaaaattagctggggctggtggtgcatgcctgtaatcccagctactcgggcgactgaggcaggagaatcgcttgaacccgggaggcggaggttgcggtgagccgagatcgtgccattgcactccagcctgggcaacaagagggaaactctgtctcaaaaaaaaaaaaaaaaagaaaagaaagaaaaagaaaaagaaaaaaggccaggcgtggtggctcaggcctgcaattgtaacactttgggaggccaaggcgggcggattgtctgagctctggaggctgaggcaggagaatctcttgaacctgggaggtggaggttgcagtgagccgagatcgtgccactgcactccagcctgggcaacagagtgagactccgtctcaaaaaaaaaaacaaaaaaacaaaaaaacaaaaaccctgtctctactaaaaatacaaaaataggctgggcggggcatggtggcaggcgcctgtaatcccagctacttgggaaactgaggcatgagaattgcttgaacctgggaggtcaaggctgcagtgagctaaggtcacgccactgcactccagcctgggtgacagagtgagactcaaaaagagtctcaaaaagaacataataaaaattaaaataaataaataaataacataagaaaaaaagaaagaagtctgacatgcgtctcactgggtgaaaatcaaggtgtcagcagggctgtctgtgttcttttctggaagctctggggaggatccatttccttgctttttctggcttctgaaggcttcccaccttacgtggcttgtggcccccttccagtgtcaaagacagaaatgacaggttaaatacttctcatgtcacatcactgaacctgtctttcctgcctccctcgtccacttttaaggaygcttgtgattacactgggttgccaaggtaatccatgataatctccctattttaaggtcaactgattaacaaccttaattccaattgcaactttaatttctttttgccatggagcataacgtattcacagatttcacagatggggacatccttggtgggggggcattgttctgcttaccacagtttatcagtagacaagagagaaaacagccaatttagggaaataatatatatatctctattttctgctgagacatctccacagtgtctttacagactgataactagagctatttctctagttaacaaaggcagagtggccttccattgcaggtatttaccatggcaaatgccaagcttctttgtgcaaatgtttatgtgtgtgctaagcattttaaatagatcttttgcatcactctattttcacactgtgaaggatataatgtagttatgagctttgaagatggacagacctgaatttaaattctgactccattacttattacacctatgaaccttgagcaatttacctaatcttccagagctttaatttcctcatctataaattaaggattaaaaacagctagcagaaaaggttattgagttgaatgcaataatgcatgtgaggccatgagcagaggctctaagtatattttgaattgtttttccctttagatgttttcccaggtacctggytctctgggcctaggacacataatcccagagggtataaatctagtgcttggtcccaacatggttttgctccctaaatactgaaatagtagacaagacgacacacctgaagcccgaaagaggtaaatttagtatacaaggaagggaatactctttgtyatataaaataatagtaagttcactaaactaattaatgcataaactcaactaaattgtgagttaataaggttgtgatgtaaactgaataaaacataaagaatggtttagttctatttggtgatcacaaaaatatattagttactaaggaaaattaataatagcctgtgctatgtgtcaggtcccaatgtgaagtgctttacaaacatctcacttatttccaccaactaccaggtgttacccctgttttactgaaagcaaaccaaagttaaggaaaggtgcataacttgccatcattataactgtcaatactgatgaagagtatgttatcgtcagtcttatgctccttaaggatgtaggggtacttctatatcttttgcgggcaatgatggatggaatattgggctgaaccaattagtatgttaattttaaacttctgcttgaagaaaggatctatggtaggtattagtagcgagagatgagaggtatccttatatcttttaatttcatattcttttcctatgagagaagggcaagaatctaggaaattaattcagttaactaatatttattggacattttctattttccagggattacgaaatatccctcttctacatttatcatttagacttcaatygtcttcactgaaaactgaggggcttagttttaaagttctttttttttcctttaaatatctaagagcctataaatccactcaatcttcattttctcccaactagaccttaaagtggcatgcagaattatagtgagacacaggtgggctgtgtatggtggttcacagccacagttggtggtggggagagtaaaggttatgatttccttttttctctacttcttcctatccatatttgcataaaaacatggtcacacattcttacttgattacttgtagaargacacattccaaagatactaacacctttagggtaaaggacatctcttccttcacaatttattgcagaatgctaggtttacaggagaagcttgaggaatgcttaagcaatgttcagttgatatgaaaagttctattagcttaacttctagtctatttgcttcagttgctgccaaacatcgacagcctttcaaaccaggatccttccttatttagagaagtttgcaggagggcttccatttccatacaycggattaaatgcttttccttctcacctgtttaggctaatggccttcagtgttatgcagagtaaagacattctgtagcctccattcagaagaaccattttgtttgaaaaagaaaagtctaattcaagcagagtcattaaatgaaaatgagaaactttagaaaaattaagaaaaaaaagttgagtattctctagggaacacagattgttttgctgtttagaccgagataagttcttcaatgcctgctctcaagctgatttagtctatgaaaatgattttcttatggatggaggctttcctatamctttactttgctgttgatatatttcttttttatactaaatcttttttggtgggaactgtttagacctatgaccttagaacactggcctgacttggagaaaaatgaacttgaaaagaatcctgtgatatatggagcacacacctttacatataaaaattaaactactggcccataatcagtatagctcgcctcatgatagattattctcaggctaaatttataacaggcactcaacaaaagtattcatckcttatcccctaacattatctagtagctataggagccggtgacctagtaaataawaaaaaaaaatctttaggggtggaatgtaactatawgcagtagcggtaattctgctccatttgtaaggagggtgaaatgcgatatggtcatgtaccctyttggtacacaagttccayaggctatagaaaaacaagtccataccctctgatatctgcattccttattcttgttatagcttacaaatcttctttagacacttaacagtgataattctcccagggaaactaaggaagcacatgagtcatgtttcttaactttaatgttgtataatctgaaaattatctatagatgctttttttttccattggtgctagaaaattccgcctaggctcaatcgatatccatttctaaacttctgcaagaaagctttaactgctttgacatgccaaaaatccaggtgtgaattaaacaacgaatgctttacctcgttttcaccactagttctaccagtcagaatcttttcaaatcatcctcagccagtgcctgtcatccacggcctggtaacacaccctttcacctcctcataccccgtgtcttcgcttttccagtcctttggctgccctccggtttcttccctcacatacctgtctgactagttmctagaagcctggcagaaattsstctccgattttaatctggctgccacaaatgaaagaccttgragtccaaatactcctctctcaaagcaaaatctaaatggatataatttataagcaaagataacacttctgtttttttctctataaacaaaccatgcatgggcttttaaaggagaaaaggaagagtggattgacagagaaaataactgtttaggatagaggttaggaaaagactgagagcaagagaaaaggcatcaatcccagttgttaatccacgaggcatcccccagacccttctgtaaaggttaatgaaggcagtaaggcagttatctytgtttcgtgcactgatgcaatccaagcttccacggtttagcacatagtagacgctctataaatatttattgaatgttgaacgatgagagagtaattaaaaaccggtaagttgatatcataaatacaacgacaacggctcccctatcaaatgtttagtgttcccagagacagccccattgttctacatctcgttatactctggccttttcccgtttttgtcattcgaactcatatacatattgaaatcgaagcacacacaaatccctgaaatgacaaacttaaatgctatccaaaggaagttacattaggttgctgctttgaaaatgaagtcaactcctaatgggttagctgtttctgcagcattctttcccgccttcttggagttgaggtgagggattaaacaatcaaccttctctctcctttctctcattctcaaagtttttctcgccttttcyttcctttcctttgcttcatttcttttcccagtctatcgtttctctaggggtcgttgctttgctctttctccctctctgtctgttggtccctttgatcctttctttctaccccttattcccagcagctccagaaaataccttctttctccccgtctcacgtcacttccctcccttctcccatctccctctcctctccgagaggtgcgttccccactagaggccagcactttcttagtttcgtccttccaaccggcgagcagaactcggagagaaagaagggggtaaaaaagaggagaaagagagcaagagaggaaaaaacccctgggcctggagcgcagaggcccgggagctgcgtcgccatggcaacgggcgccggcaggaaacgagggacgcgcgggagggagggggcggagggcgccgaggggaggcggagggacggcggggggggggtccggctgccccggaagcacctccccgcagccccctcctccagcccggcccgcagcccctggcctgcggcccccaccttctcggccgggcaggaagtgacaggcccggagcgagccccggaggcctggctgagccgcggccgggcccgcacccggagcggcgggaggggcggggagccgcggtcgcgccgggcgcctcccaccccgccctcggcgcccccgcccctccaggaaggggaggaggcgaggggagcccgccgcggaggccgagcgagcccccagcccagcctggcgactggggaccccggcacatgaggtggacgcccccggggaagacttgggtgcacagccaggcgagaaggtaaccgggcgaccgagggccggggaggggcaggacctctgggggcttggctgcgcggggatgtatcctcagccacctccatctgtgtaacgccccaggtacctcccccagttgctttccctgcctacctccggcgctgagctctgcggtccttcggctctgcctgtccgagtcttctggctattcattctgctgcgcttcatgctgtctgtccgtcaccytagctgcctctgactgctcattttcttattcatttttccttctctgactttggtccttccagccgagcatgctgtctagttatctccctgctttcgtggtccgctgggttcctcagcctccagttccttgacttctgcctctgctctctgtatgcacatgtcccagctcacttgggtcagttcattcccggcgcaccactggatcyacccccttcccccagtgtatttgatttctctttgaaacatcattttcatcaaggttctatatagaacgaggacccttgggcgtctactccctgttctcttgattattaccgtgtctttggcacagtcttccctgaaccacccccttctcccgtcccccttcctatgtcccatcctttctgcatgataagagtttcgtgcttagggatattgactttctccaactctcggcccaatgctaagtccacctcaatgtcccattctaactcccttcggtaggtctgtgcgcctacccaaccccatgtatgcccacatgctaccttttaagatgaccatggcttagctactctgggggcatctgtggatcagcttctcactgtcttccagtttaatttggaaaattttgatacctggtgctgcccaaactgtttgttgtctccatttttttatatttaatcttgtagtcataatgttgatcacaaatgaatacatttatgtgcccgggatccaggaatcctggttttggtggcagtttcccttgattttattgagacttttaagttggtccctttacatttttatttctagttsacaatccaaaaaaaattattaatcagaattcagktttgggaagacgaggggtcatacggtttgtattttcacatgtgaatgtaggaattatgttctctatacctagcaaaggggtctcgtgtctctgagtccagtgaactaaatccagtaatctataaaactgtgccgtgctgcctctaatccttacccactttttttcttcacatgctgataatgaggattcatgggtctgtatctgtttagtgctttgatattttggcaaaagatgtggggagaaggtagactagttgaagctgatatgatttttcctatgtactttttgggtratatacatgtttgcagtgacatttgctagtcctaaatgaaactaaagaytggggggggataatagtgtgattggatgatactgggaatgagataataagaaatatcctcagctttattgccaaggccaagcagtttgatactttgcttgtttgtttgttttggatgcaatccctaagaccagtccattcaccctaatgaaactgttgacaacacttagcagaaattctggtttgatgtttatattcttaagccagataatattttggtgacctgatatttctagtggcccagtgcctcagaagtagagaaaatagtgtgtagcttaacaaaagagaaaaacaaaaaaaaagaatgagtaaaaaccttattgtcatttagtgctgctttggaagaatatttcttcttctcatctcctgcctctttgcttggttcttagcaatgttttcatatgtgtctttttgcaaatgtaagtgtagtccccagtgggtaaattctgacatgttagtagattataaagttgcatcttactttcttgaagattttcattgtgtgtatttctatgtttcatacyccggagtcatttcttaaaatgatatattacattcagtatgaagcctyctttgcagtgaggaaacaggtataaggaaggaaagcaacatgcctgaggtgttattagtagcctgagctggaaccaggcagctatttgggctatgtgggctgtaggtgagctcttctgcttcctagttttatgaccttccatgacccactgaatgtgtctgtatcttaaggtcctcctccataaaatgaggataactactcactatcatagtgaatgacactgccttaattacagtttggtttgaagaagcatgtgttagtccaaagacttgatacttactagggcaacttctttaacctcagaaaaccttatgtctcaaattgtagaatgaggataacagtgttgactttacagcactactatgagagagatacagcataggtgaagtgcctagcccagtgaaaggaggcaactagtggctctccagtatatggtgactcatttggatgataacgatgcagatggagacaaaaatgagataaccaaaacttttaagtggaaagattttaaactgttaaaaaatgctatgggaatgtaaggtaactttggtattgtaaggtgccatctcacattctggccgttttatttaatgacagccatgagggaatacgtaaaggttgtttcttttgagactgcatagcttcaaaagatggtagtattgggaagacatggttgcaagagtgtattgaagatttgggagttttaagatgagaaatcatggcttatggaagaggaggaagattcttagatacttatggatttcctgtgtttttgaataataacatgagataacagcttgggatcaagatataaattttaaccttttactgcttccctctaggtcttgagtcagacagagcaccagccttggggaccctggaccactatcatggagactgagagcgagcagaactccaattccaccaatgggagttctagctcagggggcagctctcggccccagatagctcaaatgtcactwtatgaacgacaagcagtgcaggtgagactcagctctgaggggccatggtctgtgagtcttggcttgtggtaggcagtgatgctggaaaataattgtactcagttctttttcaacaaactggggagagttgggttagatgatgactaagctgtcttccagctctgagaatcttaggagtttacaaatgtttaggcaagcaaacagtgaaatcyggtctttcaaataaggatttaaaaaacacattcagtccatctagctagattctaactaaccctttctcatactggattgccaggtttttaatctttggccattcttgtaaatccccttgagtaatagaagtatcatggaactctttagagatttatttttaaacaaacagcaaattccatgtttttattaattctgttaggaaatgaggtcttttagcaaatattttggttactagaataactatacatatcataaaaatagttctaattattaaagaataagaatacagtaaagtccagttagcactaaaaccaaactactattttcatttcataaatctgtattagcatactgatatgtaaaaatgccaattagttgaattcgttgaaaattttacgtgaaggaatctttagaagccactatttattttttcattatttccaacccattagggctgtattacctttactgtatacctaaaatatacttttacattttctccttttttttttgagacaaggtctagctctgttgccctggctggagtgcagtggtgcgatcagtgctcactgcagcctcagactcccagttctcctatcttatcctcctgactagctgggactataggcacactccaccatgcccagctttttttcttattttctttacattaatcggcattttgtttattttcacccgatctagtctttgctatggcatgtatttccagctcccaattggagaaacaagtttgtataaattgcactgctttacttttcttaacatcctatggagaataaaccatagaattacattcacgcgtcacttaatgacaggaacgcgttttgagaaatgtattgttggacgattttgtaattgcgtgactgtcatagagcgcacttacacacacccagattatgtagcctactccgtacctaggttatacagtataggctgttactctgaccactcctgtgtatgtagtctgccattgaccaaacagtggatatgtggtgcatggctgtaattgtttcttccggtttttaaaggactatatagacttactgaggcagaaggatctctctgtttttttgagatggagtttcgctcctgttgcccaggctgcagtgcaatggcgcaatctcatctcactgcaacctctgcctcccaggttcaagcaattctcctacctcagcctccctagtagttgggattacaggcgcccaccaccacgcccagctaattttttgtatttttagtagaggcggagtttcaccatgttggccaggctggtcttgaactcccgacctcaggtgatctgccctcctaggcctcccaaagtgctgggattacaggcaggagccaccacgcctggctcagaaagatctcttgaggccaggagttcaagaccagcctgggtaacatagcaagaccccatctctaaaaataaaaaaaattagctggacatggtggtgcatacctatagtcctagctacttgggaggttgaggcagtcaggaggattatttgagcctaggagtttgaggttacagtaaactatgatcacgccactgtgctccagcctggtgatagagcaggttgactttgctctaaaaaaatgaaggaaaatcagccgttgacgatttagcccaaactcccatctcctctggtttctgtccttcccatggccccctttcacacaaatacagtgatttacatagaataggagctaggagtggtccattctaaatrttttatcctctcttttcctaggctctgcaagcactgcagcggcagcccaatgcagctcagtatttccaccagttcatgctccagcagcagctcagtaatgcccagctgcatagcctggctgccgtccagcaggtgagaggtcagcagccagctggcccgagagggaggggacaggcactacaggtgggtaggggagattttttgggcatatagcatcctatactaagccaggctgcagacagcctcctccgcctcctgtccttctgtgggaggatggatgcatcttagcttctggggttgcagtaagaaccgtaaaatcactttttaggtatagagtggctgtgttatagacctgcattgtctaataacgtagtcactagccacatatcgctattgagtgcttgaaatgtggctagtctaaatggagacgtcctataagattttagagttagactacttagtacaaaaaaaggtaaaatatcagtaatttaaaaatattaattacatgtgaagtgatattttatattgggctaaataaaataaattatgaaagttaacttttcctgttttactttttaaaactttgcatagtagaaaattataaatgtggttcatattatatttatattggatacctctggactagacttttactgactcatgatatgacytgaccaaaagatctttttctagctgggcgtggtggcttacgcctgtaatgccagcactttgggaggctgaggcaggtggatcacttgaggtcaggagttcaagaccagcctggcctatatggtgaaactcattctttactaaaaatacaaaaattagctgggcgtggtggtgtgcacctgtgatcctagctactctggaggctgaggcaggagaatcgctcaaacctgggaggcggaggttgcagtgagcggagatcatgccactgcactccagcctgggtgaaagagcgagactccttctcaaaaaaaataccatctttttccacctaaaagagagtgggagctggaggacaagttgcctctctgccccaggagggttatgtggggctaattggttagcatatgtggtaatgtgaggatcactggactagtgaatatacttttctttaccctaaagtggaatctccctgtttataatgtgaaatctctatgttttgtgcttgtgatttattactagaagactgagagctttttccttcactgtctttgctatttcttgtttcccttcccctttaataggccacaattgctgccagtcggcaggccagctccccaaacaccagcactacacagcagcagactaccaccacccaggcctcggtgagtacgccctctcccactgagaggcttctctacctgggtctttgtctctgggttaaattactttgtgccgctgatctgagagtgtttattgagccgtcagtggatagttactgcttttaagtagagaatagtagtacaaggggaaagtaaccaacattaatctatattggagtctctaaagaggaagtctaaggaagagaggaaagaaaatcctggggaagaagaggagataacaaagaaggggactaatccctggactcttcaatgagaagtaaaatctgttctgtttcaatcttttgtcttctcaactgttaacactagtggttagagactgttggttttttttcactttggtaataccctaaagtagccaggatgacagttttggatatgaagacattatttatttcccccggctccatgaaagtgaaatactctgttcttgactgtgtgactctgaatttgtcagtcacgtacctttccttttacttctcccaaatccttagtcctggttcctttctgtaccacacagatcaatctggccaccacatcggccgcccagctcatcagccgatcccagagtgtgagctctccyagtgctacyaccttgacccaatctgtgctactggggaacaccacctccccacccctcaaccagtctcaggcccagatgtatctacgggtaagccacagatgcagtcaccattgccccagaggcataattgtctggccctggcaaagacttgagtgaaagcttttttttgagacagaatctcgctatgtcacccaggctggagtgcagtggcacaataatggctcactgcagcctctgcctcccaggttccagcgattctcctgcctcagcctcccaggtagctgggattacaggcatgcaccactatacctggctaatttttgtatttttagtagagacggggtttcaccatgttggccaggctggtctggaactcctgacctcaggtgatccacccgcctcggcctcccaaagtgctaggattacaggcgtgaaccaccgcrcccggccaaaagccatttttttaaaccatggtaaccctgatgttttgagagaagctgggacctacttcccatactttacttaacctggaagtgatgttctgtgttcacaggtagcctatagattaaattgagatattatgctagaaaatactggcttaacatttgactaaattagtgttagatatagtcgacctttaaacctgtggctcaagtatacaaattctgtgttatcgctcagcctacctactttctatatataagtacttgttctaaaatcctaattttctctatttctttgacgtgtgactcttkgacatcaatctgtagttttctatgcwttctaggttttcttctggatggttcattacatgtggagaatatgaggctcctgggttggtgtggaagaggcagggctcagctgtttaatatcttctgtttattttgtcttgtggtccttcctttccatctcttctgtctcttctttccctcttgkcctctttgctcttcctcttcctctccttgccagccacagctgggaaacctattgcaggtaaaccgaaccctgggtcggaatgtgcctctagcctcccaactcatcctgatgcctaatggggcggtggctgcagtccagcaggaggtgccatctgctcagtctcctggagttcatgcagatgcagatcaggttagtggcgatgactttacctgtgggtgggcactgggcaggatgaagggaatgaccacggacctgggtccacccttctgccccattacacttttcagaattcttactttttgtgttttgtttttccttcccttaatcaccatagaacttgaatcccatataacctttgagttaatctgagttagaaagacaaggagatttgcctgaaaatagtcttgtggatctgggaagtcttattttcaagatagggtaaatttcctcaccatccttctagtcctctgtgggtttgttttattcggagagtcttaattctctcatagtactgtcagaagagaagagattgttgagagaattcttctgttagttagatgtaaagctgacctggctgagttactggaggaatgtttggttgcttctgtttgtgagttactctagttctcaactttcagtcttctcttcctgttcactgttttttcccagtaaaggtcttcctcaccattacttctcatgacttattcccaaaatacatgtatttttgagcctggaattttagcttcttatagatgggacacaacctaggatcttacgataattatttcatccttttagtttatttatcagtaagctggtaaatgttgagttcttccttcatgtacttttggccctccctgtttatgggtttcatacctgtaggttctgcatctctggcttccacatccgcagatacaaccaactgcagattgaaaatatttgggaaaggccgggcgcggtggctcacgcctgtaatcccagcactttgggaggccgaggcgggtggatcacgaggtcaggagatcgagaccatcctggctaacatggtgaaaccccgtctctactaaaaaaatacaaaaaattagccgggcgtggtggtgggtgcttgtagtcccaactacccgggaggctgaggcccgagaatggcatgaacccgggaggcggagcttgcagtaagccgagatcatgccactgtgccccagcctgggcgacagagcgagacgccgtctcaaaaaaaaaaaaaaaaaagaaaatatttgggcaaaaaaacaattaaaaataacaatacaagaacaaaaaataatacaaaaatacagcatcgtgtaaccatttacatagtacttacattgtattagatattataagtaatagaggtgatttaaagtgtatgggaagatgtgctatgtgcacagatgatgtgcaaacactgctctgttttataaaagggacttgagtgtctgcagactttgatgtccatgagcctggaactaatcccctgtggataccaaggaacaattgtattagaaattttgcaggattaaaaaagaaatgtgagtcaggtcttcaaagagcttagacaatgaaagtgctaaattaggctgggcatggtggctcactcttgtaatctcagcactttgggaggctgaggagggtggatcacctgaggtcaggagttcaagaccagcctgaccaatatggtgaaaccctgtctctactaaaaatacaaaaattagccgggcatggtggtgtgtgcctgtagttccacctacagggaggttgagacagaagaattgcttgaatctgggaggtggaggttgcagtgagctgagatcgtgccactacactccagcctgggcgacagagtgagactccgtctccaaaacaaaaagaaagtgctaaactaaatggtgctaactttgagtgacacatgagtttggaaaagaattggttacattactttgcaatgccttattgggatacttgagcagagtcttggacgagtggatttgatttggagtgagaagaaaactagagagagaacagcaagcgtaagagtatagtcatatatttaaatrcgagtatgtgtggtaggcgttggagatgaggggataaataaaatagaatcaacaggcatgrtgatagaagaggtcattgctggggtagagcatataaaggaggttgtagttaacttcataggtcacagggatcattgctagctattgaacagcagattaacaagatgaggaaagtacttaggaagaactatagggagaataactgttctaacagttcctggagaagagaagttagggaacttgctaagaaactcttgtggtcatctagctgtaaggcaagtctttgttttagactctggtgatagcaatgggagccacgagtgaggttggttccatttccatatccagttctttgatttatccgctcattcattcatcagatatttgagtgtcaatatgtggaggaacagagggcagtagttaaaaatacgcatctgatgggtcagattccagctccactacttactgtgtgaccctgtgcaaatgatctgacatctttctgttatcgtttttttcatctgtaaaataggtattgtaatatacctacctcaggatgtgttgtgaggactaagtgagttgctgcgtttgactgcttgaagaatgcctggacgtagtgagtgtttaggagaaactactgctattaatatatcaaacattccttagcgttggatgcccaagaaagtcacgatcactgcatttgtggagctcacagaccattgaaacaccagacattaaactgatagtcacctgaatggggaaataattgagaaagtaccgagtgttctgagaatttagaaagggacctaacttagctttggcatggggtgtaaaagtcaaggaggtgacatttaacttggggtgtgtagaagttagccagataagaatgtggaaggagagtgttggaggcaggagaacagtgtgtccaaaggtcctgaggagggcaggaacttgatttgttagaggaattaaaagtcttgtattcttggagtttggcatagtggggctagacgggtaggaggaaccttatctttcagggctttgggggctgtgtttaggattttgggctttttataaaaagcaattggaagctatagaaggattttaaatatggaagtgtcatagagagatttggatgtatttttgttttgttttgctttttaaataccatgttgatttcctctttggagactaaacggatatggtgtgagtgtgactgtagggagaataactgttctaacagtttaagggacagacgatgttcatactgggggtagcaatggagatggacagaaatgcatagatttgaggataacttagaagaatcattgaagagggtgaactaatttagtagatgggggaattaaaggagatgccagataggaaatctgtggggtggctggtggtgctgtttatgagacgaagaatgtaggagtgtatttagagtgacgttcagttttggacatgcagacctaattagaagtgtttgtgagccatccatgaggagatactgagactgcagttttattatgtggttcttgagctcagaggagaggtctgggttggagataaacatttgagagtagtaggcatatagatgataattgaagtcccccatctactaaattagtttactctcctcagtctttaaaattgcctggggaggccgggcacagtggctcatgcctataatcccagcactttgggaggccgaggcgggcggatcacctgagatcaggagtttgagaccaacctgggcagcgtagtcaaactctgtctctactaaacatasaaaaaaaattagccgggtgtggtggtgcatgcccatagccccagttaacttgggaggctgaggaaggagaatcacttgaacctgggaggtggaggttgcagtgagccaagatcgtgccactgcactccagcctggtcaacagaggagactccatcttaaaaaaaaaggccagcgctgtggctcatgcctgtaatcccagcactttgggaggctgaggcgggtggatcacccgaggtcaggagttcgagaccatccagcctgatcaacatggtgaaaccccgtctctactaaaaataacaaacattagctgggcgtggtggcacatccctgtaatcccagttacttgggaggctgaggcaggagaatcacttgaacctgggaggcggaggttgcagtgagccgagatcgcgccgttgtactccagcctgggcaacgagggcgaaactccatcttaaaaaaaaaaatgtttggggagatagtacaggttgaggagaggaacgtttaatatggggccctgaggtaggatgaacccccactttggaaaagcagttcaaggtcgacagaggatcgtgggctgacagaggcgaatgggaaagagcagcagataggaaaatctggactgtagtgtcacgaaggcaagggaaccaaatgttacaagatgtgcatgtgtgcatgcgcgcatgcgtgggcagggggcatctctttctaatgtagagagagaaagaaagatggttttattaacagggagggagagttgtttcagttgtttggggggtggtgaatccaaagtagtatgagtttgaggggtgtgaatggctggtgggaatgaatacagtgactgtaaacagctattaagagtttagcagcaccaggaaaggaaggtggaactggggaggggaatgtgcagttcctacatggtgatgagggagccagtggagaagaagtggaagaggaggcagtggatattatatgctgcttgagatggcaggaggaggtggaatatagagtgcagagaaggactgattgccttttgataggaagaggagagaagggggaaatgatgggtgtgtatgcagataaatgtatagattcggtggtggaactgatgaagcaatgctcatataatggtttttgttttctctgaagaggtgaagagtaggaggagaaagagaaggtagtctgaggtatagggagagagtgggaaagtttgaaatagccattatggaaatgaagctgattggaaaaactgtatattaataattgccagataatattatgtgctctagcacccaatcctgatgattcttgtcaatatctctcaaaagccatcaactctttactgctcctgcctgaattcaggtttttattattttaacctgtactgtactagttttctttctttctttctttctttctttctttctttctttctttctttctttctttctttctttttttttttttttgagacagagtctctgttgctcaggctggagtgctgtggtgtgatctcggctcactgcaacttctgccttctgggttcaagcgattcttgtacctcagcctcctgagtagcttgattacaggcgcgtgccactatgcccagctaatgttttgtatttttagtagaagacggggtttctccatgttgctcctgctggtctggaactcctgagctcaggcagtctgcccaccttggtctcccaaagtgctaggattataggcgtgagccactgcaccggcctattgtactagatttctacatggtcttcttcacttcagtcttaacctacttgtagttcttttccacattactatcaggaaacttttactatgtttttttaaataagaaaatatatgttgttactactaattttttaatcgtacttctggtacacagaatttgataaaattgtaatccttggatcatgacactctctcactgttggtctcgtcataactgttaaaatttatttactctgtaatttttaataatgtaataagcagtgtgcagttccgtctactgccttccattacccacagtaacgagccttctgatttctaagtccattcttccctcgggtccttttttatatggttttattgcatctctctatgtttctaaaatgccctttttattatagaaaattttaaaggtacacaaaaacagaaaaagtatgaattcctgtgtacttaccatccagcttcaacaattatcgacacatgaccaatgcattcaggcccttctctgcctgtggaatattttgaagcaaaccccagacaccatgtatatattttaattgtattgaaatgtgtaaggtactcgtgctgtatgtacacttttggagagtgctttcttaataacattgtcacgatccatttgttttgttgcagtcattggagtttattaattgtagtttctatatactattccattgtatgaatatactatagtttattcatcttctcttctgtagatggccctttgagttgattccaggtcgtggttgctaatgaataatgccaccatgaacattcctacacatgcctcctgtggtacatggcaagagtttgtcttgtggaattcctgggttagagggtgtgtgaatgttcaactttaggatatgataacaaatattttctaaaataggaagtgtattgatttatacttcaatcagaaatgtataaatgtataagtgaatgtttattttgattaataagctttattggcttcctataatcagttaagcagacatcattctttccctttatccatattttggagtactgactatgtgccggaactgtgaaggtgctaggaatataacaatgaataagacagataaacttgctgttcccaaactaaagttcagattccttgtttcaatacaccaggcccttactggcccagcaccttcctacctccttatccacagcctgccttccttgctttatttctttccattccttgtaactctccccaaacataatgaaatatttataatttctaaaaatacagtctttttagaaattatacattttttttaataatattttaaaataatgtctttttttttttttctggacagggtctcactctgttacccaggctggagtgcagtggcgtgatctcagctcactgcagtctctgcctcccaggctcaagtgatcctttcaccttggcctcctgagtagctgggactacaggtgtttgccaccatacctggctaattttctgtatttttttgtagaggcagtgttgcccaggctgttctcgaactcctgaactcaagcagtctgtccgtcttggcctcccaaagtgttgggattacaggcatgagtcatagcgcccagcctaaataataatccttttttggttctggccttgcaaatgctgttatcaatatctttaaacccccaccttcaccattacctactgagtgtcacatcagtatcacttgttttaggaagcccttccttgatctccctagtcttagttgatattccttctctgtactcctrtggtactgggtgcatatctatacatcttattatgtcataagtgataattttcttgtcttctgtagtagaaagtaatcattaagagcagagactgtgtctttcctctgcatttccagtatccagtgtagtacctgaagcatagtaggtttttgggaggtgctgaatgattgaatggcgaggaaagggataattgaagagatattttgaaggaataaaagaccacacttgatgataaacttgctagtgagtgaagatggctgaagaatcagatacrgagccagagttcctccttaggaggtaggaaggccttaaagtatatggtaaaggcagagatacgagctgaggtattctgtggaatacgacacaatagcagtcctggctgcttttgaatctttaaccttaatgcctccagtcctccttttctcaatctgttttttcgtatctttcaggttcagaacttggcagtaaggaatcaacaggcctcagctcaaggacctcagatgcaaggctccactcagaaggccattcctccaggagcctcccctgtctctagcctctcccaggcctctagccaggccctagcggtggcacaggcttcctctggggccacaaaccagtccctcaaccttagtcaagctggyggaggcagtgggaatagcatcccagggtccatgggtccaggtggaggtgggcaggcacatggtggtttgggtcagttgccttcctcaggaatgggtggtgggagctgtcccagraagggtacaggagtggtgcagcccttgcctgcagcccaaacagtgactgtgagccagggcagccagacagaggcagaaagtgcagmwgccaagaaggcagaagcagatgggagtggccagcagaatgtgggcatgaacctgacacggacagccacacctgcgcccagccagacacttattagctcaggtaaattgtcattcctcatgtcattattctctcagaattcatgtgaaattttcctttttttctttttttgcctttttttctttgcctttttgttttttccccgcttctgttggtccttgaatagtggaaggaatgggaataatatcagccttgaacatattagttcagggtcaggaggacaagtgacagatacagattttatctgtttctaccaggcagtagtcagcttacaagttcccctgtccgctttcttaggctgtgagttcttcagttttatcactctgtctattcattcatcacatcttactgaattgcttactgttttctaggaattactggggatacatttttgaaaagtagattccctgtcttcatgtaacttagcatttactataagggatgaattctcacctcactgtttaatgtggttacttgatccagtgtatagcagatacagtacaatgccttagagcacttaagactaatggagaggcggggtgcggtggctcagtcctgtaatcccagcactttggaaggccaaggcaggtggatcacttgaggtcagagtttgagactagcctggccatcatggtgaaaccccgtctctactaaaaatacaaaaattagccgggcgtagtggtttacacctgtagtcccagctgctcgggaggctgaagcaggagagtagcttgaacccggttggcagaggttgcagtgagctgggatcacaccactgcactccagcctgggtgacagggcaagactctgatagtttatacttgctttcagactgcgggtaagatgtagttagatgtgtgtatcttatttggtcatgttgatttttgccttttyttgtttctagtaccttagttgttgatgtatttagataatttactcacaaaaaaattaagagttagttattactatacttggtatttatatactctagcagttctatttctaaattgctttatcatcacatgctttgatctctggacaatctggtacaayatggagaagtagagtttgtcactcccagtttacagtggaggaaactgagttaggtcagagctgacaggtgctgactctcaagactcagatggtggtctaagctgatgatttgtaaaatccaagtcatttgtgggawgacgttgrcatctttaactctgtgggtatctcttctttcagtgaatattaagtgcttctgcagtgtcaggccctgggctgtgttttagggatgtgaaaatgaataaaacatggattcagcctttgagaaactccaagtctaatggaggaggggctaaccattcttctttgctgagtacagagtaaaagaatacaatatttaagtatggcaaagataagagacacaagaaattactcaggatctgaaatgactgagcaaggragttctttctctgagatctttaagactagtagtagttggtaatgtctgattgagtgggaagagtatggacgaagtgatgtccaagtttcatactgactagatttcttttcaccgcataattccaaaactaggttataccttggaaaaatgaatttacttttaatttaraatgattattattctctgctcttttttctctctgttgtattctgggattgttcctatagccacctacacacagatccagccccattcactgattcagcaacagcaacagatccacctccagcagaaacaggtggtgatccagcagcagattgccatccaccaccagcagcagttccagcaccggcagtcccagctccttcacacagctacacacctccagttggcgcagcagcagcagcagcaacaacagcaacagcagcaacagcagcagccgcaagccaccaccctcactgcccctcagccaccacaggtcccacctactcagcaggtcccaccttcccagtcccagcagmaagcccaaaccctggtcgttcagcccatgcttcagtcttcacccttgtctcttccacctgatgcagcccctaagccaccaattcccatccaatccaaaccacctgtagcacctatcaagccgcctcagttaggggcygctaagatgtcagctgcccagcaaccaccaccccatatccctgtgcaagttgtaggcactcgacagccaggtacagcccaggcacaggctttggggttggcacagctggcagctgctgtacctacttcccgggggatgccaggtacagtgcagtctggtcaggcccatttggcctcctcgccaccttcatcccaggctcctggtgcactgcaggagtgccctcccacattggcccctgggatgacccttgctcctgtgcaggggacagcacatgtggtaaagggtggggctaccacctcctcacctgttgtagcccaggtccctgctgccttctatatgcagtctgtgcacttgccggtgagtgatgtctgatggttttgagggcactattatgcatgagagtggacctgggctaagtggaaatagagcttaattgaataggggaataaagagttaagagggttaatattggtatttatctgcttcttctgtaagagagtgacacattatataatatctgaactttataytcctaaatttgttgctgatactattctgggtttttgggtatgtaataagttagatcaagatagccttaaccaaatcagtctttgaaaaaacaacagttcttggttggtctacgtgaatacagggtctcaagacctaggtcaggactaaatcatgttacattttcttttgtcctgatggaaagttactaggaatgaccaggaattttagtgtaccatgggaagtagataaattgggaaatctggaactaagaaaattttctttgaacatatggtaataattgtggttccttattatccttcatttgtacatctttgtttctttcctattctttacggtatagggtaaaccccagacattggctgtcaaacgcaaggctgactctgaggaggagagagatgatgtctccacattgggttcaatgcttcctgccaargcatctccagtagcagaaagcccaaaagtcatggacgagaagagcagtcttggaggtgagtaactgacttctaatgctgttggagagcacacagagtagaggaatgttctgagtgagctaaaagataaawctggttgagtagaaaatgggccagaagttggtggacaaatgaatagatccaaaaacagggaatccaggtgaattgtcaagggtggacatagattattatggaagatcatgctggctcaactaatagatggatcaatatgtcatctcatgtctgttgcttaatctgtgtttgttttccagaaaaagctgaatcagtggctaatgtgaatgctaatrctccaagcagtgaactagtagccttgacccccgccccttcagtaccgcctcctacactagccatggtgtctagacaaatgggtgactcaaaacccccacaggccatcgtgaagccccagattctcacccacatcattgaaggctttgttatccaggaaggagcagaacctttcccggtgaggrcagggccataaggtgggactttgaagtggggacttggtctgattgttgtcttttcaaactccagtaaaagtaaaaggcacagaactatttaatgaaagaatggttcaattacgctatttatttaattataaagaaggaaagggaaaagagtgtgtggaccataaaatgaaaatgttaggaagaggagaaaaaaaggaagaaagtaacctttaaaactgtaatgtttagttagataaactagtttgttttataatgaataaaattatagtaatgaagttaaggagctttcctagggtttgcagaaccaggactagaactgaggtgtcttgactcctagtgcattctcagcaccataggaaggaagaggacaaaatagggagccagcgtaggaacctgttctccaatggcttatctggaaaaaaagccagttactattttttttttctcatttccaaacattgtatagagaccagttactactcttgattaccgtattgaaagtgattctctctgaaccagacttggtcattaactcagagatccaagcagagrcataattgatggggaaatgttggggaaagctatagagaagcagaaggggatcaggctaacttaactctcaatgttttctgggacaggtgggttgttctcagttactgaaggagtctgagaagccactacagactggccttccgacagggctgactgagaatcagtcaggtggccctttgggagtggacagcccatctgctggtgagcatttatttagagactcatttgggggaaggagactcgtggagatgtgtttgaggactcggtgtaaaatagtagttacctatttatttaaagtagaaatgaggcctggcacagtggctcatgcctgtaatcccagcactttgggaggccaaggcaggcatatcacctgaggtcaggagtttgagaccagtctggccaacatagtgaaaccctgtctctactacaaatacaaaaattagcctggtgtggcagcatgcgtctatagtcccagctactcgggaggctgaggcgggagaaccacttgaacctgggaggcggaggttgcagtgaagtgagctgcacgccaccgcactccagcctgggcgacagagcgagactctgtctcaaaaaaaagtaggaataaaatgaagtctgtctacatatagaaaccatattatatatcagagtatgtagaatcacggaaaaggaattacataaggtgaggggaatttatccagctaaagtaatcttttgaattattattattatttttttttgagacggagtttcgctcttgttgcccaggctggagtgcaatggtgggatcttggctcaccgcaaccagtgcctcctgggttcaagcgattctcctgcctcagcctcccgagtaactgggattacaggcatgcgccaccacgcctggctaatttttgtatttttagtagagacggggtttctgcatgttggtcaggctagtagtcgccaactcccgacctcaggtgatccgcccgccttggcctcccaaagtgctgggattacaggcgtgagccaccacgcctggcccttgaattattctttactctatagatgtattttttggccgagtgtgatgactctcacctataattccagtactttgggaggccaaggccggtggatttcttgagctcaggagtttgagaccagcctgagcaacatagtgaaaccttgtctctacaaaaaaatataaaaattaactgggcattgtggcacatgcctgtagtcccagctacttgggaggccaaagtgggaggatcgcttgagcccgggaggtggaggttgcagcgatccaagatagcaccacggcactccagcccgggtgacagagtgagactgtctcaaaaaaatttttttttccaaaagatgatctaaaataggacatttrtatctttaatttccagttctccttattctagattttataatctatcttaaggactcttactgattttcccactgcttttggaaatctttgtggtagaaggatcttatatctttctaggcattagtagttcctctctcctcagaaattgaatcatatctgaaatctaagagtatgaattaggataaaattagtaagacatctaaaatggagagagttcggcttaaggttaggaagacgtcataaagttctcamgggacaagtcttcgtgattttaggttttgaactttgcgttttagggattctcaactaggttgtgtaggtttttgggggtgaaccctgagaataattttagaatccagctctgagcctaatgattgcctgaggggcagcagaaacccatggtgactgtccagcaataccttgttttttagagttagataagaaggcgaatctcctgaagtgcgagtactgtgggaagtacgcccccgcagagcagtttcgtggctctaagaggttctgctccatgacttgcgctaagaggtactctgggcaccctcctccttgccctcagcactggtatctccatctaatgttacaccccttccccaggatcgtctcmtagctgatattttatgtctccctccttgcttttattcccttccccaaatcagctcataagcagaaattcacatttagagcagggtggtcytctgtggcrctattgacatcctatatatgccctgtcctgtaggtacaatgtgagctgtagccatcagttccggctgaagaggaaaaaaatgaaagagtttcaagaagccaactatgctcgcgttcgcaggcgtggaccccgccgcagctcctctgacattgcccgtgccaagattcagggcaagtgccaccgggtgagctgcttgttgtagagccagatgcctttaaactgggtctttttttctttccctgcagggcaattcatttgcccaggtaagagggtgtgagatgagaactctggtttcacattgattgcattactacaaattccaagagatcctgaccccctttgtctccrgacctcttacccaactactggttcatgtttccattaatccttacactgtacttgagtacaattgttaattgtactcaattgtactcaatttctctcaattgtacttgagagaaaatctagatcaattgttaggtcatggggagaatcaaggaagtgatacagtttctatttgaaagactttgagagtagattttgggaatttgcaaataaartgctgcttatttcacatatgataagatgagtttttcttctacgcccaacccagggtggtttgggaagaaagagagaggaataaacctttgacactgacctcattggtttgctcttttcccctatagggtcaagaagactctagccggggttcagataattccagttatgatgaagcactctctccaacatctcctgggcctttatcagtaagagctgggcatggagaacrtgacctggggaatcccaatacagctccacctacaccggaattacatggcatcaaccctgtgttcctgtccagtaatcccagccgttggagtgtagaggaggtgtacgagtttattgcttctctccaaggtactgaccctytcttcaacagaacccaggttgttttccttaacatcatcccacaggggccttgataagagggaaagtaattgacttttaagcagtaggagcttgaatgctaatatagaggctctactcctaatattcaagttgacttcctaatttttttctgggttgacattatcttctgtaatgtcagcaattttacagtrtttgattctcatcttatgatgtagctgcatttytcactaaatttttggataaaatgtttttgtgtaattaactatgatacctcccatggggaaaaaattttttttttcagtggagcagggtattagaaactaagtggccattgttgccccactcttcaaagagggcttgtttgctagtcttcttttttttttttttttaaacagagacagggattccctatgttgcccaggctggtcttggagtcctgggctcaagatatccttctgccttggcttcccaaagtgctgggattataggtgtgagccactgcactcagcctatatgcaattttgacagagtttttttcggaaatgaaaatcaccctacccttcttgctatttgtctgaattctgggcccttaaacaaaaatatcacaaagaatctttttgccagtataaaagaaaacatgcttttatttctgttctctccctttcccctgtctctaagctatttgaatgaagttatttctgtggttgaacaatttagttgcttttcctttcttggtcttggactttggttttgttgttgttgttgttttgagacagagtcttactctgttgcccaggctggagtgctgtggcatgaattttggcacactgcaacctccgcatcctgggctcaaatgatcctcctgcctcagcttcccgagtagctgggactataggcatgcatcaccatgcccagctgatttttgtatgttttgtagagtcaaggttttgccatgttgcccaggatggtcttgaactcctgagctcaagtgatctgcctgccctggtctcctaaaatgctgggattataggcgtgagcctctgcacctggccattttttaaataccagttgctttctaatttcattttgcttttaaagcttgccatctgacttcatattactgaatttaggacaggtactttggaattaatcattgctagacctcagtttcatttagcttcccttctcctatcatctggcattacctacatgttctcaccatttcttctaggctgccaagagattgcagaggaatttcgctcacaggagattgatggacaggcccttttattacttaaagaagaacatcttatgagtgccatgaacatcaagctgggccctgccctcaagatctgcgccaagataaatgtcctcaaggagacctaaggtggccctcttgcacaaaccagcctaaggcagacactctccactgtccaggttataacctggtaccagcagactttgcagggaagaaagagttgttccaatcatgtaaccttctgtaggggattactgagacagggaagagaagtgcaagaattggttgctggtgctacatggcggcagctttgacattttctctgggttctactttattttttaaaatctttacagttctcaccatttcacgtaccttaatccaatctttataaaagaggcagtctagagaactaggactgctcagccttatccyggagtggagcatttagcccaggtcttaattctccaagaggaggaatacatagtatggtaaggcaaggaactgggtggaatgtcaggttgcctgcccaatgggagaggtagggtttttctagcttgtgtgacagaagtagcaaaatctggtcctyccccctcccagtgtagctgtggctcagagttttttytttttgttgtcacttactcccttgtgattgaattttttctcctgcatccatggcaggatccccagccartatagagacttggttggcatcttctgctgcagggactaaaagtatttgactggggcacatgtggctgttgtcattctttctgcatcccactgttcccctccaatttatgttattttctaccctgtttttcagttccatctctgctctgtcctrtagctttataaaaccagagtgtgtggggctgaggtcaggagtataagtacctgccttaggcactattccttatataacaaaaatattaaatatttttttcctcagtaaaaggatgaaaattggtttcagttgtcttactctattccagtctttgcccactttcacacaaatgacaaggccaatatgttttgtttgttktttaatcattaagagtttttgtacaaaargtgatggttttttttcttcattttaaaacaccagggtgtgggggrgggatgcaaacaaataacaaaaaagatgcttttgtaacattattttccctgtttagaaagaaaaaaaatcactccaatagtattgaaaagtccaaagatgaaatagtttcattttcttttcctaaggcttataaaaggscccctgcctrttgattccatccctcttttgtgtccagtggagycatgttactcttcagtggcccaggggttcactattaaagaaagatcagtccaggtttctgggcacatggcctaaacaggaagatggaagcatcagaggattaaaaacctttccccacagaaatgtgggcaagaagacacttccctgagccagcagaagggacaggtgcagcagcattccacacccagcgcagaggacagcagagccctcgatgtcccacttctgcttccgttccctttctagaagattgaaaaaaaggtcaaaaccacatgcctgtggagaaagtgcgacatgtttagaaatactggtagggaaccaggartaagaaaagctttaccagcttttactacaaatggatgaaagacatcaggatcccaccaccgcaaggtaaagtgacttcccttttctggaacccctgtggcacaggagtaccaattttcctttccaacgaactggatttctggataggcattttggctgtatgtggacagataagaccacagtccttagcccaatcccagctatacagtcaccccaatttccacaaatgatgtgatggtaccgtataatcctgtaattgggaaatttcacatttttcctgtcctaatctcagaggtgggagaagcaagtctagaacatctccaggctcagactaaacgagagtacttggactgcaaccaagtaatcmctgcaaagtagttccaagcagcaaraaataccagattctcatggaggctactatagggtacagaataacaacatgaaarcaatcaaccctgtataaataatgtttcttggcattttttttttaattaaagaaatccagtgtctcaaaaacttgtgaaaatgtgtttaaaaaacaaacggccagtgagcctgctacaccattttgcccatatgcctattgtaacttctgatgtcaagagacaatgcaaaagcctctgttttcacaggccctattatattaactctgacttacaactgtacctctctagagaaaaaacagaaaataaggaacaaagggaaggcagttttactagtgaraagatgcaaatcaaaagcaaactggraagcaagagcaatagtaagggtgagatgagggactggagttgagactgcttgagaaatctggctgtgtagctttggtttgggggactgaggaagaggctggacatataaagtgcaatctacattggtaataaatggtcatccctttcttctgactcctcccccagctggtcatcccccacaccacgatatgctgcaggcacatttcgaggtttagaacggcagacaaagtcacagccatcctgtagggggaraaaaaaraaggaaataattcgcagcatctaactttaggatatgagaaagtgtacttatggtctaggaatgtggcaagaattggttttctatagggataatgagaaaacctaaaagatctgacaatcagcctaaattcaatttggggcaacaggagaaaaagtttcttcttattaggcctcaccttcttcccacccaggccctcttaaaagctaaatcagatttagaagagcccatctggtcaacagtgttgctctttcagcaatgtcttaccaaggccagaaatggatgctgtgccacttactactctgtactagggcaactgtcttgtttgctgggacttttgtggttttagcactcaatgtcctgtgtcccaggaaccccctcagtgtgaacaaacgaggatggttggtcacccaaccttgtttgcaggctacaaattcaaccagctgccctgttacttactgctaccaggttgccaagatcctgccagaaggctaagtggggaaactgctccattcctttggctcccactaccagtcgctggtataggaaccccccaacaacataaacagcaaccagtgatgcaaacctgtagagagagaaagacatctatacttaagaactgggaaatagtaaaaactcagataggataacctctgcatttattgtcagctgtytcctaagatacattccctgaaaaggaaaaatgagtagtgatwctaaatgaaaaagggggctggtaactcttagaaaaccagttagagtgctgtcagtccaagagaagcaaaggcccagacaaaatgtgacagcgtgtgattctatggccaagaataatcaccattaagtatatgmttccatttctctagaagttctcataatctaatgaaataatataaaaattgcctagtcctgcagtaggggaaaaaagcacctccaaatgcaaatctataccggcaactaaacattaaatctcatttttcaaaaacttgcagtcagaatttttttttttttttttagacggagttttgcccttgttgcccaggctggagtgcaatggtgcgacctcagctcactgcaacctccacctcccaggttcaagtgattctactgcctcagcctcccaagtagctgggattacaggcatgtgccactgtgctggctaattttgtatttttagtagagacggagtttcatcaygttggtcaggttggtctcaaactcctgaccttaggtgatccatctgccttggcttcccaaagtgctgggattacaggcgtgagccctgtgtcctggcagaattattttatagccagaggatttaaaaagttatccccatcaattacagcataatgtacacatacaatttgtgcttatgtaccaccatatagttactgaccttaaaaacaaaaggaaggaaggtctgttctgataaaggaaggcatactcacgtgacaagtaagatggaacccacactgaggtgggagatctctggtgaacaggccaggctgctatccatctcaaagaggtagaaacaatcttggactttgccacgctcctcagacacagggttaaaattgtcctgatgatgagatggcataacacattcaggtggttargtgttttgactcctgtccaacaaaataaaaaacccaaaaaacatctgctccttcctggttcagcagcctattttccatggaagatgcgtgtctgacacagagagaaactgagctcctagttttctaatgtccatcccaacgtatygtgtcccctctggatattctccccaacctcaggtcagtcctttcagtctcctccctcggcttatacaacacagggtgcctcaccgctagggtgtgtcgattgcaggagatcatcaccactgcacgacgctgctccttgccacagtggttgtcatattcatcaccccctttatagatcagcatgatccaattacctgaggagggacaaggaaaatggagctatggggtgggggaaaagcagaggcagatctgggtggtatggcagagtggaattgcgtaattcattgcaattggttataactaaacaaccctcatcagtacgaacttggtataccagaaatgccaagctaaacttgtttgcttacaaagacttgtgttcccttaagacaagaatcagatattcatttaagaataatcttaatttttaacattaaaggtaggcaactgacaatgcaaaaccaattatgatccataccttaacactgattcattttctgaataccttctaaaagcaaaaaaagaggttccatacaattgctgagcagcaggggtaagcccatctaagatttcaacttagccccagataaattcagagtggatatctaagattggaatgcatatctcttctttagtatttactgtgttcagttcttttgcaaaatatcatttgattcagtaattgtgaggtgaataaggtaaagattctgctcctagttttgcatatgagaaaacaasgtcaaaaggtgatacgactttycagtcacaggattaggaaacaggaggagaacctggtcacatgatccccagccccaaacccttttgttacttttttattgtattatttaccaggagtaaatagctaccttgtataacttatttatctgtatgggagggaattggaccataggtgcttacatggtcmtctccagcaatatgacttttaagaaatatcaccaccatagcacaaaaatcagtgggtaaagttttgcagactgagtagtttgcaaaaaaaagtttgagctcttaaaatttaactggtaaactttgattaatttgatgaaaagtggtggtggtggttggtatttktaagtctagtgtgaaactcattaaaagtatttgggtgaataaaaggactctaggctacagaattctggctagagttggctgggcgcggtggttcatgcctgtaatcccagcaccttgggaggccraggtgggcagatcacgaggtcaaagatcaagaccatcatggccaacattgtgaaaccctgtctctgctaaaaatacaaaaattagctgggcatgatggcacacacctgtagtcccagctactcaggaggctgaggctggagaatcgcttgaacccaagaggctgaggttgcagtgagccgagattgtgccactgcactccaggctgggtgacagagagagactccgtctcaaaacaaaacaaaacaattctggctagagtcttcattttgcrtaagtttttcactgattttaatgcacaactgtcctgagctgtggcttacagaggagctgtggaattaggcatcctgtggtatattacagtctcaggtgtgccgaacsacacgtatgatatgctgaagacactagaaamggccaagacatacaggattgtcagagggattgacttgggatcagttagtcaatcgatggtaggaaggggagttttcttacttccgttgaagatgtgagtctcgttgagtctccctaccactgtctccttcccattacttttgttgatttgcaccaggcctgccccagaagtgtggttgccagcttcccggcacaccctgaagatgtagatgtatgtgtctgaaccctggcccacagtgctctcaaagctgtaaagagaagtgggaagaaagaagaggagagttactagctatcagcctcaggaataacagcatccctttccttaattaaaacaaaacaaacaacatgctcgatttatttatttgaggtcatggctgagtgaatatttgtttaattttaagatattcataaccttgacagaccatccttattgctgatgatgaattattaaaacacacttgagctatcttgatagctcaatattctagttatttttagaatgcctgttagtaaccatgttccaatgaataagggcccatgttcatcggatagtctcgtttcttagggaccaacttcagatttatatatctgaaggttcctgacacttataatgacatgtgtcggcctaaatatgtttatytgatatttctaaagtcctattatatgtaggtgtcaaataatccttaaatttctacaagctggtctcttggatccagtcttggaaatagctacacttctgtgaaagatgagaaaactgcacacagcaactaaaaactgggctgagaatttgctctatgtcataaaagagagcacattatgaaataaaatcagtaagaagaaaagactttaacataaatattttctcaagctctttaaggttcttctcatttaccttttattaaacagtggtttcagcctcttcactagagccaactctttctctgactctttacccttttctcctaccaagtcgcaagttttttcttctgtctgccaggattctctcactgccacagccaggagtagtagtagcagtccagtcctccagcagctgtagaaagggaacatcctttgggagagagtgtgtgttggggagggcagrtaggatcaggagagagaggaaagagataaagcgtatgaatgtgtaataaatcgatggtattttaattatccagaaagtacaagattctctggcatatgcaacacatagtacattttaatatctctgtaacaagagcatctgcagcagaaaattcatttatatgtaacttgtagtctaatgtataggtgagtctttcagaacaaactacaaagttgggaagagggaaatgaaagaacttaaaaaagaatgatgacagcttgggtggagccatccttgcctctttactgtttgatggcttgatgtagtcttctgaaacctctttggcctctacaggtcacaaatctcaagggtttctagacttcccataagtacagttgtcttttacactacaaatcaatgacaacaaattggggatcaccaagccactttacaattgagtaaattcaatgcacctgctgcttgtactgctctaggaatgaaaacacacagacagctctcyttcccaaacttactagactggtgcaaaggtcattrtggttttggcaaaaaaaccccaccaaaacctaacattttcttttctcttatccatcttcatacccaggacagactgacttacccttgcaaaacactttactctggtatctgttaatgatccctcaggccattgctacttgtttattccaagagtatcacggacaatttcctgatttaactcttctaaacttttctcacttacaaaaaacgctgcaagtctggactttggtttgaatattctttaaagttctctagttctttttcatgcgggtccacttactccacctcatttttaaaatataaaacttgaaacaggcagaattttcatgggtactaatgagtttgaagatgggaaaatggaagctccaaccttggccgtgaatgcactttccccattcccctaaacaacctaacatctgaccttccacttcccacaccccactaaagcaaaaaatcccgggaaattgtctacctgacttcctgtaccccaaacatcaattctctactgtaatattatggtagtttccatagaataatcatagctaaccaagaggtccaaggccctcataacacatttaatgcactgaaaccacacaacagcaggaaacaacagactactgccttgggccaggtgctgttcaaagcacttaacatatattaattaactaattaatcctcacaaccttatgagtaaatacaattattgttgctattttaccagtaagaaaactgagacacagctagtggagtgagccagagagtctagctccagagctcatggtctgtgttgaacaactacatgtatatttccactatgtgcataacaattttttggagatgagagtagacagccaaaactgtgggtttttttttttttctactaagaagtgaaggggaagtgattcctcacacagttgactgaataggaggtgaaataaagaactcagacctccaactcccaccttccctaagttaacccactgctcaacacacaacttgaccagctgactcactaaaaagaaataggagactccttcttctagactgacttagcctgccattttcctttccagtctctcaggacctaattaaaaactgacagttgatttcttttcctaaattagaacaaggaatctcacaaaattaggaagggatgaaaggttaaacacctcagccattagctgagttgaactatctttcatttgcttattattcaaaaagttaggataataaatttatactgtattcttctttcctgcttaaggcttgtctttaaatttaagctgcttctctttaattcagtggcatatgcgctaaatgttttccctagattatgttcattcatcttcacaacccagaaaataggtataatttttcatacttcacagatgagaaaactgatgctttacagaattacttgttaaattacttgctgtacattacacagatattaaatgtgtgtgaagttactggggcaatttagacgattcgtggcataaagataactgctggaaaacttataaacataggggtgcaacaatcaggaagagaatgaaatggaagggcccrgtagcccccttttaatatgctacaattagattctcaaggtacaagagtttgtctatatactttggaaataaggagcaggattttatgatcttgaaaaatctttcagttttcttattctctaacgacagatctattttatttggcaatgctaaaaattatcctttattagggtggccaatgactaagccagcaactgggaagcagcttacaccactgggcctctgtagcactcacttccccatctgttaagacagccatggccatttaccagtggaatttctactgtcttcccgctggctcctttctgatgtagcagtccttatccctttttctccagcagcctacatgtttagaaaagcagcctcaattggctaaaaggcctaatgctgaaagaactcaagagagaaggagcctcagacaagtagcggctatgtcccaagagcggaagctccccacaacgaggaacacaagataatccgtccrtcagccattcttatccacaccacagtcgcatccccctcaaagctctcccagggtgccagaaattctcgctctgtctagtgtcccgactttccaagcgcttgtagccataccctctccaaatgatgccacttgacctcccaccgtgatgcaggccaaaattcctcctacaaataaatccaccaacacctccaacggactccatacttggggtattttcctttccctgctttctaaatatcgtaaatcccctctctggtcttggaagtcctttctccctcacacctttcggaactccgtgactctccgctctcatgcctccgcctccattctacccttagggctcctcagccagatctttrgctagaaccatggtcaagggagaatgcgattccggctcctgtcacagacgcttaagtgtgagcgcaacccagcccgcctcctcctccacgcccctcacactcacgtgtcgtgggaaactggagtagccaaagctcagaatccccagtgaayacccttctggggatgggagacggggccagctaggggccggccgcagaccccggtcccagagctagtttcagaggccagcgttcyccctagcgcctcgctgtgccccactctgggaaccggaaacaggaagcgccaagaggccgctgggcaaccgctcctcccaccagaccccgcggcatgtgaccatagaaccatttcgcccctttccccttcccgggctccctgataatcttaaactctgattggccagtattctgggactttagctccgccctcgttccrtcagctccaatcactatcgaggttgtcgtttcgccttttctggttgcctttctttcaatggggtcccagagtcccgcttccagggcctctcggctcgcgcaccccggtcacgcggggtcacgcgcctgaccgctcccgggtagggttcgagtgaagagggtgmgaggggcaggtggcggaagcggaagttacgcaggcagctcgccctcgggctccgcgggagttgtagttctcacgctaggtctcctccgggcgcttccctagcccgttcgccgcctgagagggacgctgttccgccgcgtggaagcttcgagtctcgactccactgttgacccctagacgagagtagtgcagcgacggggccgtgatgtgcgtcctggctttcttaacgacacctctcctctgtatttcctttttccagttgagtaccttggggtgaattattattgttactgttatctctgtcgttccttactgcttcgtggtattttgcttgataagcatgctctgcamccacctctgttcgccagaggttacttctgcaaagtaggaagaaacgagcaatacgatggtaatctttgcgcctttgctaagatcttttgtaggttccttatgtcttactagccacttgttgaagtcctgctcattcttaaactctgttcagatgttatttttcctgtaacttcgtgcattcactctcttcagaattaacaatttcttcctgtggaccctcgcttgtggcttgtacctggctttagcatgttttcattccgcttccactcttacgttgcttctatgtgtgcctctctggctctatgcaggtgcctggatttttkattcttacccctctcattagaactactacagtgttttgagtctaataataataaaagctaacggatgcatatctcggtggtgcccggcacttttgtaagtgctttaaacgatagttaattcacttggtcttcacaccaaccttatgaggaagtatcttatcccaagtttacagatgagtaaattaaagcagatagaagctaagtaacaccgtgggtcccaagctattaagttatggagccagtatttaaatagtctccataatccatgctctcaagcactacgctttaccgactgtatgccattctgcatttctttgtttattagtaatacattcagttcaggctaggtagtaatcatatctgggttggatgttgccccaataaaaaaaaaattaaatttttttcttcctgaaaakgaaagtaatttgtgatcagataacacagaaaacaacaaaacaaaaatcatacataaactcaccaggagggtgtgtatttccttcatgaatatatgttgtttccttttttcaaaaatgtatcagtcccacactgtggctcatgcccgtaatcccagcactttgggattccggggcagraggatcacttgaggtcaggaattcaagactagcctgggcaacatrgtgagaccccttctttcaaaaaaaaaaaatcagctgggcttggtggtgcacacctgtagtcccagctgcttgggagcctgaggctggaagattgcttgagcctgggagttggaggctgcagtgagctatggtcttgccactaccctccagccttggtgatagagtgagaacctatctcaaaaagatatgtatgtatcaaatatttttccatatccttgactttacaaataaactttttaatagcataatatttagttctatgcattgctacttaaccaatgacattaatgttgagcatttaagttatttctactgacttaytttttatcaagtaactcaacacagctttactgagcaattactatgtgccaaaaccacagaatatataatatagatcttggggatacagcagagaaaaaagacaaaaatccctgttacaatccgttctagaattgatgttcctttgttggttaattcaagttttgatttcagaaatcttacctcttggtgactgcctagagtggcattgggctggaggggaggaactgttcatgttggaaatggggaatgggccaaaaatgcaattgagtaggttgattaacttgtctgctgtcagagtggaagcaggggtagtttccctttccgaccagaggcaaacaacctgggtcacttccttgcttctcagacctcagtgccctttctgggtgctttctgtgttagaaytctcacctctgagaactgagctcaaggttcttgctggggcaaaaattgaaatgagcagaatttttttttgtttgtttktttgcatttctggcctkcctcctttcttagcctcattattaacaagcacactccccacaataaacctacacccacactgccttctctcacacaaggtaaattgttcaccttgtttagaaagcagttctaggattgttggtctgaaatcaaatgggaaggatgcctcctgttctgtataatcataagagaggaaggtaattaacagtcctagaacctcagcttcccaagtagctgggaccacaggcgcaagcyaccatgcccagctaatctttgtattttttgtagagacagggtctcacatttttgcccaggcttgtcttgaactcctaaactcaaataatctgcctgcctcagcctcccaaaatgctgggattacaggtgtgagccactgagcccggctcagatgcttttcaaaatgatcatgttttccatatttcaaggactaaatatagtttttggtaactttcaattttaatatatttatcatttatagagaagatgcaaggataatacaaagaactctggtacacattttacctaaattcatctttttcccctccatatacattagtttattttgaacaggttgagagtaaacttccattaccattaaatatatcagtgtgtatttcctagaaacaaggacatcctctcatcaaaatcaggaactacagtattaatacaatattaccaaatccatagtctgtattcaaaattttatcacgtttcaatagatgctatgtatagttacttccgatttcccaacaatcacaggagccaagccagagtcacacattgtaattagttgtcattgatcttacttgactttgaaattttgataggtactggccacttgttttgtagaatgtctttcattttggttttgtttgatatatctgatgtaggatttttctcggtcactttgccaaccagggacccgtccatagctagtgacacccccccccgcaaaacccccaggcctcacttgacctgctgcctgtgttatagtttgtatctgcattcggtggttcctgaactcttgtcccacatccaagaagaatgaggatatgctgacaatttgaaggatgagaaggatggagaagaattttattgagcgatggaacagctctcagcggagaggggatgcggtaggtggaggtggtcccccacccctgcagtcaggtggtttctcacccaatgtggctaggtctgggcatttatggattcagaatgggaagtgtgtgctgattggtttgtgagtatgcaaaaacagttaaagtgaagacaccactcaaaggtgggcacgacagtgtagaaaaccaattaggaaagggtaggtgtatataaaatgggtgaaaggtggggatcaatcaaagaaaaatgtgccaaatgggaagacaggtttttaatccggtccatggatttgacttgtagcttggctttcaggctttaaactgtcttcagcttggagatggggtttcactggggatctgcctaggcatttgtctgcctcctgcggctatcatttcctcatgattatatttaagtttgcattttttttggatagaaatgcaagggaagtgatacgtttttatatcaatcagggtccattcagaaacagatatcatattggcgattttaacaggaaaaatttaaagaattattttctagtaaaagatgatcagttactaaaagaggactctatgatacagaagaagcagctacgaaaaggagctgttacttctagggctgaagaagagttaataaaggagttacttaagttaaaggaaatgctcccttccccacctgcaagattagagattcagatctctgaggggagggtgtgtttcctaccacaggaacatgcagtccacccactgatgaggccgagaagttgcgggagggtgtgggcctctgttgagcagccagtgggagccttttagtggtgcctcctttatccttttgacatgtccatatgattttttgaggaattctttactttcaggcacataagatgttccgattttatcttgtagcattcagcatgaatggacctggaggacatcatgctgagtgaaataagacacacacagaaagaaaaatatgatatgatatcggttgtatgtggagtcttgaaaaaaatcaccatagaaacagtgtaggaagatggttaccaggggcggggtaggggaaatgggaagatgtaggtcaaaaggtacgaagttgcggttagattctaatgttctagtgtgtaacataaggactatagttaatattgtattgtatactggtactttgccaggagagtagattttaggtactcttaccaccaaaaaaaaaaaataactacatgagatgatgaatatgttaatttgcttgactgaagtaatcacttcactatgtatatgtgtatcaatcaaaatatcttgtatgcctcaaatgtatatttttaaaaagttttgtggttctcttacccttatcctagaatcagtcatttcaccaaggggtcttggttcttttagtggaaaatggtattgaaaaaccaagatgtgattacgagttgtgtttgttgctacttgtgtgtcactgcttcagtgtcagcagacagagctaggaaattgtttatttccaagagtgaaccaagttcccattatattcattgtatgtatacatttattcacatataagaaaacacaggaagtgattttttaactgataagccatacgatgtgtgaagcaagcctactagtaagagttccatatttgtttaaagttctggtttctcttgttaaggcaaaatatataagtcatgaaatgtacaactcttttttttcttttttttttgaggcggagtctcgatctcttgcccaggctggagtgcaatggtgcgatcttggctcactgcaacctctgccttctgggttcaagctattcttctgcctcagcctcccgagtagctggaactacaggckcctgccatcatgtctggctaatttttatatttttagtagagatggggtttcaccatgttggccaggctggtctcgaactcctgaccttgtgccgcccacctcggcctcccaaagtgctgggattacaggcgtgagccactgcacctggccgaaatatacaactcttaaggatacaattcaatttattttgacaaatgcatcataactgttatctgtaatcaaaaaatttagaagattttcatcatccaagaaaatttcctcatgctcctatccagtcatcttctcctagtcctagaggcaactattgctctgattttttttttttttttttttttttttttttttttgagatagagtctctatcactcaggctggagtgcgatggtgcaaacatggctcactgcagcttcgacctcccaggctcaaatgatcctcccagctagcctgtggagtaggtgggaccacaggagtgtgctaccatgctaggataatttttttttattttttgtagagatgaggtttccttattttccccgagctggtcttgaattcctgggtttgagtaatctttccacctcagcctcccgaagtgctgagattacaggcatgagccatcaagcctggtcttttgaatttttcttttttttaaattatagattaattttgcctattttagaacttagtataaatggacagatactgatagtggtgggaagcagacaaattcctaggtagatacgggcgggtccctggtgaaaaccaaccttcgagtcaaagaccgcyggaagcctgaaaactcacctgccagttctgggtagaatctaagacccaagtgagaactcccgcaatgccttttagccaatcaaatggtgctttttccaggctgcctatggaccaatcagcacacactcccccattctgagcccataaaaactcccggactcagctacacagtgggactaccacctttgggtcccctctctgctgggagctgttctgttgctgaataaacgtcctctctgccttggttactctgcaattgtcagtgtaacctcattcttcttggacgcaggacaagaactcgggacctgccgaacagcgggtgcaaaagaacagcaggtgaaaggctgtagccctcctgccctctcctggcaccaggcggccaccccacgttatgggaagtggtggtggcgccaggccagcccaggagccrtgggctggtgggactgaacaagttgggacatgcmcccgttcggcaaagcttgtggacagcaggaatgaatgaactgtaacacaaacgagctgagactcttcggggtgcaracctcgggattccccaagccagagctgtaacatgctgtaacaccccccaccgcatttttttttctttttcttttgagacagagtctcactctatcacccagactggagtgcagtggtgtgatcttggctcactgcaacttactgcctcccaggttcaagtgattctcctgcctcagcctcctgagtaactgagattacaggtgcctgccacgacttccggctaatttgttgtatttttagtagagatggggtttcgccacgttggcccggctggtctcgaactcctgacctcacgtaattctcccacctcaggctcccaaagtgtggggattaccggcatgagccactgcacctgacctttgaagttccgcagttgctggtgtcttttgagttttttggacgccactgcgttcccttcgttcatatgccagtgcccaaggcagaagctgcttgcagtatacctgatccagccacagcttcacatgaagctggtgcctggaggtgatgccctgctgtagcagctagcatacctggcttgcccttggtgggtgtgagatctgggccagtaccgctagccaagagccaagcacagcctgccaagcccagtgggtggagccagcccagtggtcacgagtgaatcttgatcttgagcagggcccccccggccgtggaggtctctggctgtggaacaccaccaaaaaatcctgtgtcaatagcatgttccttttgcatttgtttgatttctttcactgtaatatctgtgaacttgtatgtatcagtagtaggttttgttttgtgttttggtggggtagtattacattttatgaatacagtagccctcccttctcctcaggggacatgttccaaggcccctgctgtagacagcatctaacccagttgccttcaatgagaatatgtttctgttcatatcttccacccacaaatttaatgccttttctgtcttaacgaagcacttaccgtggcccatggcagtaacttctgcagtttgagttgcaacagcaaaactagcacacattcttttcccttcttcacaatttaacagatagaggatttattcttaccatagatgttagcaacctcggaatacatgttttgttttttgtttgtttgtttgttttgttttgtttttttgttttttgtttttttttagtaagtcaagaaccttcacctttttatttaaaggaagcactttacacttctctttggcatgtctgcatagccagcattactactcttgcgctttgtggccattattaagtaaaataagagttacttgcactgcagtactgtggcagtcaatctgataactgagagggacactaacgggcagggagtgtccccagcgtgtttccactggatgaaggggtgatttatgtcccaggtgggatggagcaggacagtgcaagattttatcacagtactcagaacagcatgcaatgtaaaacttatgagtagtttatttctggaatttttcatctgatattttcagacctcggttgactactggtaactgaaattgtagaaagcacacctgcagataagggtggggaactatcgtatttctcatcttattcattcccttttgatgggcgtttgggttctatctgtattttcttctaagaagccttatagttttatgtttatgtctgtaatttatttttaaatttttttagagacaggctcttgctatagtacccaggctggtctcaaactcctggcctcaagctcttctcccaacatggcctcccaaagtgttgggattacaagcatgaaccagtgtgcccggcctgtgatctattttgagttaatttttgtgtatagttgaggtaggactgaggttcctttttttccccatatggatatataatgacttcctataacattgtttgactatttttcctctcttaattgcgycagagctttgttgagaatcagttgattgtataaatgtagttctgtttctggacttaattctgtttagttgatayctttattattaagctaataacacactcctgattcttctagttttatattaagtcttgaagaaaggtattataagtctttcttctcttttcaagattgttttggctattctaggtcctttgcatttccatatacactttaaaagcaacctgtcaatttctgttaaaaaatcctgctggggcaaggcatagtggctcacgtgtgtaatctcagcactttgggaggctgagatgggaggatcacttgggctcaggatttcaaaccagcttgggcaacatggtgagactctgtctctacaaaaaaacctaagaattagctgagcgtggtggcttgtgcctatggtcccagctacttgggaggctaaagtgggaggatcgcttgagcccaggaggtcaaggcttcagagagccgtggttgcaccactgcactccagcctggacaacagagtgataccctgtatcaaaaaaaaaaaaaatcctgctggggttacaattggggttgatatgaatctgtagataaatttggggaaaattgacatcttaatgttgagtcttataattcatgaatatgaaaccacctttgcagaactataagtaatgagagaagtctaatatggttgactccatcttgcttccaacctctcaagttaaattgtttttttgtccattctaatgtgggggccaagataactataagaggaatttagtttacagttaaaaccacattcataaaacaaagttaaaattatggtaggggcttgaactttgctgaagaatagacatagttgaacaatgacccgccattrcttagcttgtttttgttatataagttgcttactgccccagagtcttgtatctggggtsgcaagatttagagcttctccaacttctcctgtaggtaatattactattgtaaaacctgaagaactggtctttgagacatttttcagatttagcatttcaggagaccaagagatgccacttcgtcctgagaccgcttcccaggaaatgacytggctgtgtgaawatggttttagacacccctgcaatttcatccccagccaatccgttgtttcagttctccagccccctgcctgccaaagtagtagttaaaaaactctagcctctgaactcttggggggatgagtttgaaaagtgtctgtcgttctcctcacttggctggccctgcaattattaaactctttgctgcaacacctgctgttctcattgtttttttcagggcagcaggcaagaagaacccctcgggctatgacaaatagggtacaactctatttatgtaggccttaatttttttcagcaatgttttacagttttcagtgtagaggacttacgtgtctttcgttacatttgtcctgaagtgctttattttttgatgcttttataactgaagttattgtgaaaratttattttgtgaatgtttactggtagtatgtagaaacacaattggtttttgtatttgtaactgtattctgttagtttgccacttattttggcagttgctttttagatttgttaggattttatatttagacaatgartttgtctgctagtttaatatctattttcagacttctggattctgttcatgatggtataactgggactggatttattcttctatcttaaacaactggcaaactgggaaaatatatggaacaatggcttcctgatattggacaacaggtaacacaagacagtgattcctgagaggaggggaataagttaggcgagccccacaattccccctrcttaatgcatggagagactatccaaggtgcagtgcaggaagggggaacccagacagagcctgccagtttcactgagcttcagagggagagagtgtggagtttgagaagactaaggcaaagactaagatttgtgggtcagagtaccagagaaaagagagatgcgcaaagagtgagctctagataactacagaggaatcctctcaagcctttggttgagttctgagctgaaccacttcaaagkagtaggcagaacaactcttagatctcacacagtgctaggaatagtgttttcacctgccagagtggaaagatgttcttaatatatgggattttcagtaaagttctgagaagacttttgactcactagcgcattcaaattagttctagacttacataaagccctgataaagctttaatatggtgggaagcatggatccatggattgttcacatttttgcatgtctttcaagcagaggccctaactgaccttttgttccagactatcttttcaagaatatctgaatagtgaacagccttagaatacagaaatagtgtctccttctggggccaagggcagatttgtttattgtccagtataataaaggtcatgtatccttttgggacaaaatatagtactgcttgtagcacattataaaaattcagattccttaagctcaagggagattccctaaggtctcctctcatttgacccactcaatgttttctggtagttaggttatttgaggggacgaggtgtaggagatggcaaagaagaggagaaaaagaaaatttctaccctgattatcaaagataccaagagtgtcatctcctttaatccctgtaccaactcagcaagttaggtttcattttacataaggaaactgaggttcacagacattaaactgctcaagctgtgatgtagacccactggttgcacagcatccatctggccttttccatattgctgctttgagacttgggaggcaagaaaaaccaatgcaaacaggaatctcatgttgcttgctacactgtaaatagtaatgtcctttgcctttgagccaggagttttgtgtctttagctaatatttgtgaaacttggcaggttaatgtgtttgctcagaagtagcataaaatctctgattcttcacagttctagataaaaaacaggcctcaaaaggatcaaactgataacaggtaactgtgttccataaaaagagatggcaatttttatttatttatttatttatttttagagacacagttttactcttgttgcccagactggagtgcaatggtgcgatctcagctcactgcaacctccatctcccaggttcaagtgattctcctgcctcagcctcctgagtagctggggttacaggcacccaccaccatgctcagctaatttttgtattttttttttttagtagagacagagtttcaccatgttggccagcctggtcttgaactcytgacctcaggtgatctgtctgcctcggcctcccaaactgggattacaggtgtgagctactgcccatggcagcgatttttaaaagaacacaacaatatctggcactctgtagcatacaattcacaatgtctggcatccaggtaaaaattgccacacaagccaggtgtggtggctgtcgtctgtaatcccagcgcattgagtgtccaaagtgggaggatcacatgaggccaagagtttgagaccaacctggataacataggaagacctcatctctacaaaaaatttaaaaattagccaggcatggtggtacgcacctgtagtcccagctacacaggaggctgaggtgggagaattgtttaaggccaggaggtggaggttatagtgagctatgatcctgccactgcactccagcctatgcaacagagtgagaccccgtctcttgccaggcttgctaagaaggaggtaaatgtgatctataacaaggagaaaaaaaattaatagaaagagacccagaaatcacaaagctgatagaattatcagcaaggatgataaatcaggttttataaatacactccatatgttcagagaatagaggaaaattgaacatggtgaagagaaaaatggaagatattcaaataatatcttctagaaatgagaagtgtaatatctgaaatgataagatgaatatatgatggatgggatcaacaatgattagaaactgctgaaggaaagattagctgacttgaaaacgtattatcagaaaatatccaaaataaatacatggaggctaggagtggtggctcacacctgtaatcccagaactttgggaggctgaggtgaatggatcatttgagcccaggagttcaagatcagcctgggcaacatggcaaaaccccatctctaccaaaaaaatacaaaaattagctgggcttggtggtgaacacctatagtcccagctactcagggtgctgaggtgggaggatagcttgagcccaggaggtggaggttgcagtgagctgagatcacaccactgcactccagcctgggtgacagagccagaccctgtttcccaaaaaaaaaaaaaaagaaagaaagaaaaaaagtaaaggaaacaaacaaaataaacacaaagggaaaacagaagatacctcccccaaccctgaaaagatcagagcttcagtgacctgtggtactacgtcagtcaatctaacatgtataattagggtttcagaaagaggacaaatttggcccaaatttttccaaatgagataaaaactaaaaactcatagatcaaagatgctcartagattttaggcagaagaaacatgaaaaattatatatactgagctacattattaagctgctgaaagtcaatgataaagagaacatgttaaaagcagccagagaaaaaatatataatggcatagtttctttgcatcagaaactatgcaagctggaaaaagttaaatatatttaaaacactggggtgagtatggaaaaccctgtcaacctagagttctatgcattcaaaaatacctttcagaaatgaaggcaaactcaatttttttaacatgaacacatgctgagagaattcattgcaaacaggccactaaaagatatattaaaggaattttttctgcatgaaggaaaataacaccaagggaaaagttagttttatacaaggtaatgtagaacatttagaaatgttgaaccagccttgcatcccagagatgaagcccacttgatcatggtggataagctttttgatgtgctgctggattcggtttgccagcattttattgaggattttcgcatcaatgttcatcaaggatattggtctaagattctcttttttggttgtgtctctgccaggctttggtatcaggatgatgctggcctcataaaatgagttagggaggattccctctttttctgttgattggaatagtttcagaaggaatggtacccagctcctctttgtacctctggtagaattcggctgtgaatccatctggtcctggactttttttggttggtaagctattgattattgcctcaatttcagagcctgttattggtctattcagagattcaacttcttcctggtttagtcttgggaggatgtatgtgttaaggaatttatccatttcttctagattttctagtttatttgcatagaggtgtttatagtattctctgatggtagtttgtatttctgtggggtcrgtggtgatatcccctttatcattttttattgtgtctatttgattcttctctcatttcttctttattagtcttgctagtggtctatcaattttgtttatctcttcaaaaaaccagctcctggattcattaattttttgaagggttttttgtgtctctatctccttcagttctgctctgatcttagttatttcttgccttctgctagcttttgaatgtgtttgctcttgctcttctagttcttttagttgtgatgttagggtgtcaattttagatctttcctgctttctcttgtgggcacttagtgctataaatttccctctacacactgctttgaatgtgtcccagagattctggtatgtcgtgtctttgttcctgttggtttcaaagaacatctttatttctgccttcatttcattatttacccagtagccattcaggagcagattgctcagcttctatgtagttgagtggttttgagtgagtttcttaatcctgagttctagtttgattgcactgtggtctgagagacagtttgttataatttctgttcttttacatttgctgaggagtgctttacttccaactatgtggtcagttttggagtaggtgtggtgtggtgctgaatagaatgtttattctgttgatttggagtggagagttctgtagatgtctattaggtccgcttggtgcagagctgagttcaattcctgggtatccttgttaactttctgtctcgttgatctgtctaatgttgacagtggggtgttaaagtctcccattattattgtgtgggagtctaagtctctttgtaggtcactaaggacttgctttatgaatctgggtgctcctgtattgggtgcatatatatttaggatagttagctcttcttgttgaattgatccctttaccattatgtaatggccttctttgtctcttttgatctttgttggtttaaagtctgttttatcagagactaggattgcaacccctgcctttttttgttttccatttgcttggtagatcttcctccatccctttattttgagcctatgtgtgtctctgcacatgagatgggtttccggaatacagcacactgatgggtcttgactctttatccactttgccagtctgtgtccctgggatgcaaggctggttcaacatacgcaaatcaataaatgtaatccaatatataaacagaaccaaagacaaaaaccacatgattatctcaatagatgcagaaaaggcctttgacaaaattcaacaacacttcatgctaaaaactctcaataaattaggtattgatgggatgtatctcaaaataataagagctatctatgacaaacccacagctgatatcatactgaatgggcaaaaactggaagcattccctttgaaaatgggcacaagacagggatgccctctctcaccactcctattcaacatagtgttggaagttctggccagggcaatcaggcaagagaaggaaataaagggtattcaattaggaaaagaggaagtcaaattgtccctgtttgcagatgacatgattgtatacctagaaaaccccattgtctctgcccaaaatctcctcaagctgataagcaacttcagcaaagtctcaggatacaaaatcaatgtacaaaaatcacaagcattcttatacaccaataacagacaaacagagagccaaatcatgagtgaactcccattcacaattgcttcaaagagaataaaatacctaggaatccaacttacaagggatgtgaaggacctcttcaaggagaactacaaaccactgctcaatgaaataaaagaggacacaaagaaatggaagaacattccatgctcatgggtaggaagaatcaatatcgtgaaaatggccatactgcccaaggtaatttatagattcaatgccatccccatcaagctagcaatgactttcttcacagaattggaaaaaactactttgaaattcatatggaaccaaaaaagagtccacattgccaagtcaatcctaagccaaaagaacaaagctggaggcatcacgctacctgaattcaaactgtactacaaggctacagtaaccaaaacagcatggtactggtaccaaaacagagatatagaccaatggaacagaacagagccctcagagataatgccgcatatctacaactatctgatctttgacaaacctgagaaaaacaagcaatggggaaaggattccctatttaataaatggtgctgggaaaactggctagccatacgtagaaagctgaaactggatcacttccttacaccttatacaaaaattaattcaagatggattaaagacttcaatgttagacctaaaaccataaaaaccctaggagacaacctaggcaataccattcaggacataggcatgggcaaggacttcatgtctaaaacaccaaaagcaatggcaacaaaagccaaaattgacaaatgggatctaattaaactaaagagcttctgcacagcaaaagaaactatcatcagagtgaacaggcaacctacagaatgggagaaaattttcacaacctacttatctgacaaagggctaatatccagaatctacaatgaactcaaacaaatttacaagaaaaaaacaaccccatcaaaaagtgggcaaaggatatgaacagacacttctcaaaagaaggcatttatgcagccaaaaaacacatgaaaaaatgctcatcgtcactggccaccagagaaatgcaaatcaaaaccacaatgagataccatctcacaccagttagaatggcaatcattaaaaagtcaggaagcaacaggtgctggagaggatgtggagaaataggaacacttttacactgttggtgggactgtaaactagttcaaccattgtggaagtcagtgtggcgattcctcagggatctagaactagaaataccatttgacccagccatcccattactgggtatatacccaaaggactataaatcatgctgctataaagacacatgcacacttatgtttattgcggcattattcacaatagcaaagacttggaaccaacccaaatgtccaacaatgatagactggattaagaaaatgtggcacatatacaccatggaatactatgcagccataaaaaatgatgagttcatgtcctttgtagggacatggatgaagctggaaaccatcattctcagcaaactattgcaaggacaaaaaaccaaacaccgcatgttctcactcataggtgggacttgaactatgagaacacatggacacaggaaggggaacatcacacaccggggactgttgtggggtggggggaggggggagggatagcattaggagatatacctaatgctaaatgacgatttaatgggtgcagcacaccaacatggcacatgtatacatatgtaacaaacctgtaagttgtgcatatgtaccctaaaactttatactttaagttttataataataaaataaaataaaataaatgttaaatatgtgtataagtgtaaaagacacctgttttaatttttaaagatatctctaaaaaattaataaccaggctgggccaggtggctgacacctgtaatcccagcactttgggaagctgaggcaggaggatcctttgagcccaggagtttgagaccagctgtggcaacatagcgagactccgtctctayaaaaaattaaaaaattagccaggcgtggtggtgcatgcttgcagtctcagctacttgaaggctgaaatgggagatttcttgagcctaggagttcaaggctcaatatatgaaacaatggttccatgtattttctgcactgcagcctggccaacagagctggaccttgtctcaaaaaaagaaatgaggaaaaataataatttattttggaatttataacaatagaagtaaaatgtatgaaaacggccagggaaagggagatgggtatactattgtaaagttcacttcatatacatgaagtagtatagtattatttgaaagcagaatgtgactaaagatgtgcaatggagaacctagagcaatcataacagaaagaaaagaaggaaggaagggagaaaagaaagaaagaaaaattaaggaaagggaaggaaggaggagggagggaataaatcaagaaagggaaagataaataataagcaataataaagtagaatcatgaaagacattcggtttaaaaaagaaaatgaacagaaaataaatagaacatacagaagataaatgcaaagtagtagatataaactcaagtaaaatgataatcacattatctaaatggccaaaattctccaattaaaacgggtcgtcagattagatttttaaaaaaggtccaagtgtatgctatctaaaacaaaaaaaaaccacactgaaataatagaaaaatctataccatacaaagagagttggagtgcctatcttaatcagacaaagtagatttcagaacaagaaatattactaagccttgctctaaaatagagtgacaattttataagggataaggggtgataattttataaggataaaagggtcagataatcaggagaacatgtgtttgcacctaataacatagcttcaaaatacataaagcaaaatctaagagaacttgagaggaaaagacaggtccataattatagttggaggttttaacacccccaccccacgtaattaacagaaaatctgtggtggtataggagccttgaacagcatatcagttaaactgtttaattgacattaatataacatttagtccaacaaatgaataatgtacattcttttccagtgcacacagacttttaccaagatagcacatattctggccataaaacaagttttaatacatttamaaggactgaaatcatgcaaagtatatttgacsaaaacagaattaaactagacatcattaataaaacaatacctggaaaatccccaaatatttgaaaattaacagtttttctataacccatgggtcaaagaagaaataatgaattaaattaccaatattttgaattgaacaaaaatgaaaacattatcatcatcaagggatgcagctaaagcagtgcttacagggaaattcatagcattaaaattttagcattatgctaaaatttatagcattattattttttatttccacagagtgaagtttatcctcaacaaagctctcctctcccatctccagccttggacagggtaggacaggtaggggctaagatgtggctccagtggttgaggggcctctgagaaacaagtaagggccctgggcttccaggcaaaaccgtgtctggctcctccagccaggctgagtctgctgtgcctccctgcccaggccttgggaaagaggagggtgcagtggctcctggctagttccamagtggagtgtgaaaatggtgagttgtttacatgcagtggccagtacagcgtggtactcacacctctttctggaagttgccattgggtggctctgtgggctcccaggctrttgctcagtgcagtcagccgttcttgggagttctgggggaagagcccagtgtcatggatttgagggcattccagctctgaggttgcaggcttctccttggcagtgggctggctaccgtagcaggtgaaagtgtggaacttctggttgagctcttttattttagttaaaaaaaaaagtctcaaatcaatgatctaagctttcacattgaggaatgagaggaagaggaggaaattacacttaaagtaagcaaaaggaagaatctaataaagaggcacaagacatcaatggaatagaaaatagaaaaacaacagagaaaatgaagccaaaatctagttttttaaagtgatcaataaaattgataaaatgttgacaaaatgactagaggaaaggcacacatttccaatatcaggaatcagggaggtaaaatcactatagattctaagccatgaaaagcatactaagggctgggcatggtggggctcatgcctgtaatctcaacactttgggaggccaagacaggtggattgcttgagcccaggagtttgagaccagactgggcaacatggtgaaaccccatctctacaaaaaataccaaagttagccaggtatggtggtgcatgcctgtggtctcagctactctggacgctgaggtgggaggattgcctaagcctgggaggttgaggctgcagtgagctgtgattgtgccattctccaccagtctgggctacagagggagaccttgtctcaaaaaacaaaacaaaacaaagcaaaacaaccacgataataagtggtcagtaaaatctggcctgtgtgcctaatctggcttgccatttcttttgtgagtaaagttttattggaacacacacacaactatttacattgtatctatggctgcttttgtactatagtggcagaagtgagtagttgtgggagaccacattgccagaaaagcctgaaatatttactgtgtggcttcttacagaaaacgtttgctgatccctgacttagatgaaaagaacaaataaattgacagacactaactaccaaagtcactcaaggaaacagatagcctgtatattcccctatccacggaaaaaattgaatttatggttaaagttttcccacaatgaaagctttgggcccagatggcttcactggtaaattccacttcttccttttcatcttttatttatttacttttcggcttcactggtaaattccacttcttccttttcatcttttatttatttacttttctctaggatttcagtacagtgtttcatagagttgctgaaataagacatccttgccttgttcttaatcttactgagataacattcaatatttcaccttaagtgtgttaggttagttgtaggttttatgtagaagccattatcaaattgagaaagtttccttctgttcttttgcagaccttatttattctgaatgggtgttgaattttttttcatgcttctttctgcttcagttcacgtgatctatatcttttttctgtttcattatgttaatatggcaaagtacattgattgcttttagaatgttaaaccaacattgtacatttctgggataaactgtactttgtcatgatgatttattttatatttttatagatattttgttaaagattttcatgtctataatcttgaaggcggagcgtctgtaattttcttttcttgcaattttttgtcaggtttggtatcagagtcataatggcctcctaaaccaaattgggagagtgtacttacattttctactttttgaaggagcattgttatttatttcttaaagtttaatatagtatgctattgaagtcacctgagcacgaagttttctttgtgggtaagtgtgtattaaccaattcttttttttttagtggtaaagagctattcaaaaatttatttctttttgtgtcagtttgttaaattctgttttttttccataaataattygtctacttaatctaacttgttaaatttattgacataaagatataacattaccttattatacttttaatgtctttaaaatctttagcaatatagcctctccattcttgatattggtaatttgtgttttttctctttgttattttagtttttatttatttattttttttgagacagattcttgctctgttgcccaggctggagtgcagcagctcactgcaacccccccaccaccccgcccacaacccccaggttcaagcaattctcctgcctcagcctcccaagtagctgggattacaggcgtgtgctaccacacctggctaatttttgtattttcagtagagacggggtttcaccatgttggccaggctggtcttgaactcctgacctcaagtgatccgcctgcctcggcctcccaaagtgctgggattacaggcctgagccacctgggaggctgaagttggaggattgcttgaggccagtagtttgagaccagcctggttaacatagtgagacctctgtttaaaaagaaaaaagttttgtatcagctatttatatattttggatattaaccccttatcagatatatggtttacaaatattttctcccattctatagaatgtcttttcactctgtcgattgtttcctttgcagtgcagaagctttttagtttaatgaaataccatttgtctatttttacttttgttgtctgtgcttttggtgttacatccaaaaactcattgcccaggccaatgtcaagaagatttcccctctgttttcctagagtagttttacagtttcaggccttatgtttaagtctttaatccattttttyttttttgagacggagtctcgctctgtcgcccaggctagagtgcagtggcgcaatctcagctcactgcaagctccrcctcctgggttcacaccattctcctgcctcagcctcccgagtagctgggaccacaggcacccgccaccackcctggctaattttttgtatttttagtagagacggggttgcaccgtgttagccaggatggtctcgatctcctaacctcgtgatccgcccctgcctcggcatcccaaagtgctgggattacaggcgtgagccactgcacccagccagtctttaatccattttaagttgaatttttatatggtgtgagttaagtccagtttcattcttctgcatgtagatatctggttttcccaacaccatttattgaagaaactattctttgccttttgtatgcttttagcaaccttgtcaaagatcatttaactgtaaatacgtggatttgttgttgtgctccctattctcatccattggtttatatgtctgttttcatggcagtattatactattttgattgctgtagctttctgatatatcttgaaatcaggaagtgtgatacttccagcttttctcttcttgctcaagattactttggctatttggggtcttttgtgattccatataaatttaaggattattattactattctataaagaatgccacttggggctgggcacagtggctcacacctgtaatcctagcactttgggaggcccaggtgggtggatcacctgaggtcaggagttcgagaccagcctgggcaacatggtgaaatcctatctctactaaaaataaaaaagttagccgggcatggtggcgcacacctgtaatcccagctgggctgagggaggctgggatttgggaggcggaggcaggagaattgctagaacccaggaggcagaggtttcagtgagctgagatcgtgccattgcactccagcctgggtgacagagcgagactccatctcaaaagaaaaaaaaaaaaaaaaaaaaaaaaaagaatgccattgggactttgataaagattgcatttaatctgtagatcactttgggtgggctgtggtttgtatgtgtcccctcaaattaatatgttgaaacttaattgccaatatgatagtattaagatgtgggacctttaggaggtgaatgtgggaactttaggaggtgattgggtcatgagggctttgccctcatgaatggaattcatgaccttataaaaaggctggaggaaaccaggtagtcgccttttgcccttctgccttctgcccatatgagaacaagtgttcattcgctctggtgggcatagcaacaaggtgccatcttggaacagagactgggccttcatcagacattgaacctgtgccttgatcttggacttccagagaatatgacaaataaaattacccagtcttaggtattttgttatagaagcacaaatggactaagacatagtatggatattttaacagtaataattcttcctatccatgaacatgggatatctttccatttatctgtgtcttatttaatttccttcattaatgttttataattctcagtgtgtaagtctttcaattcaactctttggctaaatagaaataaattctaagtattttattctttttcttgctattataaatggtattaatttaaaattttccttttcagatagttcattgtgtatagaaacatgaatgatttttgtatgttgattttgtattctgcaactttactagttctaatactttttttgttgagtcttttagttttctatatatataatcatgtctactgcaaatagctatagttttacttctttctttttaatttggatgcctttatttcattttcttctctaattgctctggctaggatatccagcactatgttgaatggaaatagtgagaatgacatcttttcctttaaccagatcttacaggcaaaactctcagttttttgtttttttgtttgtttgtttgttttgtttttttttttgagatggagtctcactctgttgcccaggctggagtgcagtggcgcgatctcggctcactgcaagctccgcctcccgggttcatgccattcttctgcctcagcctcccgagtagctgggactacaagcgtccaccaccacacccggctaattttttgtatttttagtagagacggggtttcaccgtgttagccaggatggtctcgatctcctgaccttgtgatccacccacctcggcctcccaaagtgctgggattacaggcgtgagccactgcgcccggctgtctcagttttttctgtattgattgggatgttagctgtgggcttctttatatggtttttattatattgaggtacattctctctatacccattttttgagaatgtacattatgaatgaatgtcaaattttgctacatgctttttctgcatctattgagataatcaaaagagttttttcattatgttaatgtggtgtattacattcattgatttgctagtgttgaatcattcttacaatccagggataaattccacttggtcatggtgcatgagccttttaatgtgctgttgttatttggtttacgggtattttattgaggattttacatctgtttttatcagggacatttgtctgtagtttccttttcttgtggtatctttgatattgcttgcctcataataattatgaggaggcattacctcttcttcttcttcttcttyttttttttgagacagagtcttgctctgtcagccaggctggggtgcagtggtgtgatctaggctcactgcaacctctgcctcccagattcaagcaattctcctrcctcagcctccagagtagctgcgattacaggcacctgtcaccacgcctggctaatttttttttgtatttttagtagagatggagtttcaccatgttggccaggctggcctcaaactcctgacctcaagtgatctgcctgcctcggcctcccaaagtgctgggattacaggtatgagccaccacacccagccacattttctattttttggaagagtttaagaagattactattaatttttctttaaatgttttgtaaaattcatccatggaaccatctagtcctgggttttaatttgttgggaggtttttgaatactgatttattctcctcatttattattgatattttcaggttttctagttattctcaattcagtttcagttggctttatgtttttagaaatgtatccatttcttgtaggttatccaatttgttggcatataattattcttaagtgctccttatgaccctttctatttctgaagcattcattgtaatgcctcttcattcattttttattttatttgtgttttcactctttttttcttctttcttttcttttctttttcttttgagacagggtcttgttctgttgcctaggctggagtgcagtggtgcggccatggctcactgcagccttgacttcccaggctcaagtaattctcccatgccagcctcctgagtcgctgagactacaggcatataccatcacactggctaatttttgtatttcagtagagacgaggttttgccatgttggccacactggtcttgaactcctgacctcaggtgatccgcccaccttggcctcctgaagtgctgggattacacgtgtgagccactgggcccagctttttttttcttagactagctaagtgtttgttgatttttatcttttcaaaaaataaactcttggttttgtcaattttcttctattgttttcttttctttatttgatttatttttgctctaatctttattatttccttccttttgctaccatttggcttaatttgtttttctttttctagttttttgaggtgtgaagttagattgtttattcgagattttctttttgaatgtagatgtttattgctctaaaggttcctcttagtattgcttttactgcatcccataagttttggtattttgtgttatcatttttgtttgcagatagttttaaaatttccatgtgatttcttcttttacccagtggttgttcaagaatatattttttagtttctatgtaaatgtggatcttctcattttattagttattgatttttatttcattccattgtaattgaaagagatagatatttggaatgatttgtatcttcttatgtttgttacaacttgttttgtgacctgacatgtgatctatcctggagaatgttctctgtgctcttgaaaagaatatttttctgttgttgggtgaaaatttctgtatatatctgttgggtctatttggtctatcatgttgttcmaatcagctgcttttttaattgattttttgtccatatgttctattcattactgaaagtgggggtagtgaggtctactaatttattgtattgctgtcaatttctcccttcaaatctgtcaatatttgttttatatattagattctctgacactgagtgcatatgtatttgtaattgttatgtattcctattgaattgacctttttatcaatataaaattaccttttttctttagaggatgtttttgactcaaagtttacttttttttttgagacagagttttgctcttgttgcccaggctggagtgcaatggcgtgcattttggctcgctgcaacctccaccttatgggttcaagtgattttcctgcctcagcctcctaagtagctgggattgtagacatgtactaccacgcctggctaattttttgtattttttttagtagaaacggggtttcaccatgttggtcaggctggtcttgaacgcctgacctcagatgatctacccgcctgggcctcccaaagtgctgggattacaggcaagagccactgcacccatcctcaaagtttactttttttctcatgtaagtatagccatttctgctctcttttggttactttttgcatggaatatctttttctatcccttcacttcagtctatgtctgttcttaagtctaaagtgagtttcttgtagacattgcatcactagctactgatttttttttttttgagacggagtctggctctgccgcccaggctggagtgcagtggcgtgatctcggctcactgcaagctccgcctcctgggttctggccatattcctgcctcagcctcctgattagctgggactacaggtgcccaccaccatgcctggctaatttttttttttttttttttwtttgtagtagagacagggtttcaccatgttagccaggatggtctcgatctcctgaccttgtgatctgcccgccttggcctcccaaagtgctgggattacaggcatgagccaccacacctggcctagatcttgagttttaaaatctaatcagcctgtatgccttttgattggggattttatttacatttaaagtaactcttggtaagtgaggacttactattgccattttgttgttttttgttttatagttcttttgttcttctcttcctctcttgctgtcttccttttttttatttgatggtttttatagtgaattgctttgattcttttctgtaacacttagtggttactttgagtcttgaataaaataacttgttgttaaaataatctattttgagttgataatttaattgcatacaaatctgtacagtgttgcttcctctgcctgaattttgtgtttctgtattgtttcaatctcattcttttgagacagggtctcactttgttgcccaggctggagtgcagtagccccatctcagctcactgcagcctctgcctcctgggttcaagcgattctcctgcctcagccacctgagtagctgggattacaggtgtgcaccaccatgcctggctaatttttgcattaagagtttcattcttttcatagtgtgcattggttaacaaatctttattttttttaacttttatgttaggattaaaactatatgtaccactattacagtgtcatatgattctgtgtttgtctatataccttcaccaggagatttaggctttcacattgctagttagcatacttcacrttgctgtttagcatgtttcaacttgaaggacttccttgagcatctcttgtaagtcaggtctagtggtgataaactccctcaagttttgtttatccagaaaaaagtaatttgtccttcattaaaaatttttgaaaatgttataatttttacatttttagtatagatgaattctcactatgttgcccagatgtgggattcaaataatcctactgccttggtctcccaaagtcctggaattacagacatgaaccactgcacctagcctgtccttcatttttaaacaataatttttctaggtatatcttggttggctgttttctctttcagtactttgaatattttatccctttctcttggtctgtgaggtttaggctgagaaacctactgatagtcttacatgtgacagtctttctttttctttttctttcttttctttctttyyttctttctttctttctttctttctttctttttctttcttttctctctctctcttctttctttctttctttttttttggagtctcactctgtcacccaggctggagtgcagtggcacattcctgsctcactgcaacctctgcctcctgggctcaaatgatcctcccacctcagcctcctgagtacctggggctacaggtatgtgccactgcaccaggctaatttttgtagttttaggaaagacagggtttcaccatgttgaccaggctggtcttgaactcctgacctcaagtgatccacctgcttcagcctcccaaagtgctggaattacaggtgtgagccacttcacctggcctgtcttttttttttttttttagacatatcttgctctgtcacccagactggagtgcaatggtgcaatgtcagctcactgcagcctgtgcctcctggattcaagcaattctcctgcctcagcctcctgagtagctgggattacagatgcccatcaccatgcctggttaattttctttgtatttttagtagagacagtgtttcaccatgttggccaggctggccttgaactcctgacctcaggtgatccatctgcctcggtctcccaaaatgctgggattacaggtgtgagacactgcacctggcctgtccttcatttttaaaagataatttttccaagtatagtattcttggtttggctgttttctctttcagtgctttgaatatatcatcccatcctcctggcatatgaggtttctgctgagaaatctactgatagtcttatatgtgatgagtcatttttattgtgctactttaaaaattctctttgtcttacctttaacaatttaattataatgtgtctaggtgtagacttctttatgtttaacctacttggaatcttttaggattcctgaatctggatgtctatgttcttccctcaatttggatagttttcaattattaytttgttacatatgttttctgcttctttctctattctccttgtgggacttctataatgtgtatattggcttgcacattcatgtctcccaaatcctggaggttttctttttcattctttttttttctcctctgactggataatttcaaataacctgtgtttgaggttgctgaatctttcttcttttgatcaagtctgctgttgaagctctgtattgtattttttattttactcatgtattcttcagctctataatttctgctttttttgtttttgttttttgtttgagttggagttttgctctgttgcccaggctggagtgcagtagtgcgatcatggctcactgcaacctctgcctcccaggtttaagtgattgtcctgcctcagcctcccaagtggctgggattacaggggcctgccaccatgcctggctaatttttgtatttttagtagagacagggtttcaccatgttagccaggctggtctcaaattccttacctcaggtgatctgcccacctcagcctctcaaagtgctgggattactgggattactgggattacaggtgtgagtcaccatgcctggccctgttttttttgtttttttgttttttaatgatttctatctctctgttgaacttctagttttgttaatatattgtttctgatatcactgagttgtcaatctatgttatctttagcttactgagcctctttaaaacactttaactttgaattctttgtcgggcaattcatagatctccatttctttgggtttggttactggaaatctattgcgttttttggtgatgtcatattttcttaattttttatgttccttataggcttgcagtggtgtcaatgcgtttgaaacagcagtcacctcttactgcctgcaagggtagtggctgggtgaggtgcatggtgcactgggtcagcatgggactggagacttgtggggcacatatgggcactagttctaaagggtgtgtcatggcattgggtctgataggtgagtgcacacatgcaatgctgggcttggggtaaataagcagcattcatcctggttccagagggtgtggctgaggctctagctttggagggggtgcagcagtgtgagttctgggcagctccatcggctggtgtcagcattcttgaagactgtgggggtccttggcagttaaggctgtgggtatttgtggcagtggggatggctgctagagtcctgagtggcacaggttgcatgggttttcctgctctccttttcaccttgtgaggaagtcacagctgatggtattcctcttgtctttgagctttgccagcctggggaatggggttacacaggtaaaatgctttctacacttttctgcatgaccatcctcagtttttctgtttcactgagttgcagcagctttttaattgcactccagaactctcccagagctattttcatctgtggataattgctaaattgttgtttttgtggatatataaggactggtacatcctagtctgctctcttgctgtgttagtcctcttgctcaatcttattagaagtttatcagtcttaatcttgtcaaagaaccaaattttggctttgttaatttttctagtctttgtttcatgattttattaattttccattttaaaattctgtcttttcttctacttacattggttttaatttactcttctttttttaaccctcataaattataaacttggattatttattaatttttttcttttccattcatttaaaactacagtatttgctgtaagactgttttagctgtgttctatatatttttgtattctattttcataatcatttaatttaaaatattttaacgtttaaaattatttttttcttttacccatgggttattcttcaaagtgggtattttaatttccgaatatttaggaattatgtcgattttttcttgttattgatttcactgtggttataaaatatatctgtaagattttaatattttgtaatgtattatattatggctgagtatgtaatatatctttgcgaacattttatttacacctaaaaacgtgtattctttaattggtgaatgtcattttgttgggttaatttaatttggtcaaggtggttgatggtggtgttgaggttttttatattattactgaattttgtttaatagttttatcagttactgagaaaaggtttttaaaatatccaactatgattattgatgtttatttttctttaactcagcttttgcttctgttcatatgttttgaagctcaaaattaggtgcatacttatttatagttgttatatatgcttgatgcaatcagtaactcatgtaattatgaaatgtacctctttatactcacctatttttgtcttatattagtatgaccacttgtggaaggctgaataatgtctctccccacctcaaatatgttaacaccctaatcccttcagcctataattatgttaccttatatgacagatactttgtagataggattaagctaataatcttgagatggagagatcatgctggtttgttcacgtgggttcaaggtaattatgagagtccttataagagggaagcagtagagtcaaagtcagaaaacagagttgtaacaataaaagcagaggttggaattatatacttcaaaggtggcagaagaatccacaagccaagaaatttgaaatttggcaaaactgatttccttctggaggctttagaggagaacatttccttgactttcccagaaggaaatcagttctgccaaaaccttgattttggacttctgacctacaaaactttaagaaaataaatatatgttatgttaagtcactaagtttgtgttaggttatgtgttacagcagtgataagaaactaacacaccactccaggtgcttactgtaatgtgtatattggtttgcacattgtatatatttgtatacctttcttttaatctgtcattatatttaaagtgcatatcttacagccagaacagacaatatcttttttttttttttttttgagatggagtttcattcttgttgtccaggctggagtgcaatggtgcgatcttggctcactgcaacctccaccttttgggttcaagcaattctcctgcctcagcctcccaaacagctgggattacaggcacctgccaccacgcctggctattttttgtatttttagtagagatagcgtttcaccatgttggccaggctggccttgaactcatgacctcaggtgatttgcccgcctcagcctcccaaagttctgggattacaggtgtgagccaccatgcctagccagaacagacaatatctttttggttcttgctttttcttctagtcttacaatttgtgccatttatttggtgcagcagtccatttatgatgaattcaattattgataagactggctttatcattttgctgttttttaaaatgatttgccttatctgttttactttctgttttttttaaagaaattaagatgggaaaagaaaataaatataattctttatatgtacttatatatttaccatttctgttgctcttcaatgttttctgtatatctatgtttttatctagtgatacttattttctaagaacttcttttagcatttcttgtagtgctggactgctcatgacaaatttgctattttctctgctctgaaaatatttttacttcctcttcatttctattggatactttttctggatatagaattctgtattggcagtcttaccattttaccttttttttttttttttttttttgagacagagtttcgctcttgttgcccaggctggagtgtaatggtgcaatctcagctcactgcaacctcggcctcctgggttcaagcgattctcctgcttcagcctccagagtacctgagattacaggcgcctgccaccacacctagctaatttttgtatttttagtagagacggggtttcaccatgttggccaggctggtctcgaactggtgagctcaggtgatccatgtgccttggtctcctaaagtgatgggattacagccgtgaaccgccgtgcctggcccattttaccattttaaagatgacatctcattgcttttctccttttttgtttctgwtgagaatttagctatcattcatgtgttgtttcccattattaatgtgttatttattttcctctggctgttttcagtattttctttttatctttggtttttattagttttagattatgttcttaggagtgattttccttctgtttatcttgatgcggattcagtgagtttcttatacctgtaggttgtatcccaaatttggggaatatttgatcattactttttcaaattcctttccgatttcattatatgtcccctttattttgggggactwcagtttcacttttgttatactatttggcattgttcataggtcactgaggttctgttcatttttttctcccattttttccctctattcttcatattggattatttttagcaatctgtcttcatgtttactgacctttttatctgccctcttctatttgctattaatctcattcagctattattattattattattgagatggagtctcgctctgtcacctaggctggagtgccgtagtgcaatctcagttcactgcaacctctgcctcctgggttcaagtgattctcctgcctcagcctcctgagcagctgggactataggcatgtgccgccaggccaggctaatgttttatatttttagtagagacagggtttcaccatgttggccaggctaatattttatgtttttagtagagacagggtttcaccatgttggccaggctggtcttgaactcctgacctcaaattatccacckgcccccgcctcccaaaatgctggattacagctgtgagccaccgtgcctggccctcattcagttatttttaaaaattatgaatgctgttctgttctggaatagtcacttgattctttttggtagtttctacttctctgagattcttcaaatttttattcattatgactatattttcttctaaktctttgaacrtatttatgcagatattaaagtccttgtttgctagttccagcatctatgttacataagtttcttttctacttactgacttttctttgatccatggcccatatattcttatttctttggattctaataatattttattgtatgctagatattaaatgtgatgcattatggctaatctgtgttatgtatcctcttttttgaagaaaagttttattggggaataatttcagatttacagaaatgtttttaagatagcacagaacatttctttatacctttcaccccatttcccctaatgttagcatcttaaaaaatcatggcacatttctcaaatgtaagaaatgaatattgctacattgtttgaattttaccagttttccactaatgctctttttgctgttccaagatccaatccaggataccacattacatctagttgttatatttattgttttcctctggtctatgacagtttctcagtgttttttttttttcgtgaacttgatatattttaagagtattggtcagatatttagtagagtaccactcaatttagaattatctgattttttttttgcatgtttacattggatgtgtaggggaaaactttcttcagctgtgtttttcttctgctttcacaccagcactaccacaattatcaacacagaagaagacttgtgtgaccaaatgtggtaggggtgttccccacataccaattagcagacaccaactgggtatcctctaattcaattccgacattatctacctggagatagtgttagatcttacatttcagggattcaatatgcaagatcaccccctacacccacagacaccagtcacaagtctgggcctctggaacatctgaccaataagcttcaagttgggatttccacarcttcccctttgagttcagttaatttgctggagcagctcacagaactcagggaaacccttatgtttatcagtttattataaagtatattacaaaagatacagatgaagagaactgtagggcagggtatggggaaaggggtgtggagcttccatgccctytctgggaaggctgctctccaggaatctccacaggttcagtcatctggaagcattctgacacagttctcttgggtttttatggaagcttcaggacatcagcattcttgctgctgaccccctccccttgtcaccccagtaaagggcaggaccctctctggggaaggttttaagacccacaatcagaaaggyaggggaaaattagagtcctgccttgaggcagatgaaaggagggcagaagaaggccagaggccttccccttggggcctgacacactcaacattataagaaaggactgtaacagggaccataggagttaggagccagaaactgtggatgaaaaccaatatatacatatgtataataccaccctggggttatggattttggggaacaaaccttactggttaggtgcttttatcattgcatcatattagggggtacatgatatcaacaagactcatcactggtggttcacgcagtgaaccctgttcatgtggttgaggtggtatttgccaagattctttaatgaatagttactatttccttttatccatartgtactctttggaagtgagtctcttatccctgactaccctcaaagggaggagagttaaattccacatcctgaatggggagtatctacatatattatttggtattttctgtaagcaagatttgtcacttctcacctatttatttatttaaatcagtatggatttatatagtttttccccttgtgttataattcaacactgtcatttattttgttgttcatattgttccattgggagcttttccaggttggtttctgtgtcctgatatgctcccatctttttttttttaacttgcttattttttaacattaaaagactggaagatcctccaagcttattttgtactttccctgtcctggccctagaattagccatttcttcaaagarcccctgattcctatgttgccttctgatgtggtttggatctgcatccccacccaaatctgacrttgaattgtaatctccagtgttggagatggggcctggtgggaggtgattggatcacgcggatggtttttcatgaatggtttagtaccatacccctagagctgttctcctgatagagttcctcacaagacctggttgtttaaaagtgtgtaacacctccccgcgtctctcttgctcctgctctggccatgtaagacatttccctttgccttccaccatgactaagtttcctgaggcctgcccagaagcagatgccactatgcttcctgtacatcttgcagaactgtgagccaattaaacctcttttctttatcaattatttggcctcaggtatttctttatagcagtgcaagaatggactaatacaccttcctttttttaaaaaatgatcttaattattttaaagcatacaattcagtagtgttaagtattattatggactgaatgtttgtctcccccagattcacatattgaagccctaatcctcagtgtgactgtatttggagatggagtgtttaaggaagtaattaaggttaaatcaggtyacaagggtggggccctgatctgataggattaatgttcttgtaagaagagagaccagagccctctctctttcttcccttgtgcacacactgaggaaaagccacttgaggatatagtgagaagtctgcaacccacaggggaagcactctccaaacaccaactctgctggcatcttgatcttagactttcagtctgtggaatgatgaaaatataaataaatttctgttgtttaagtcacctagtctatggtattttgttgtgatagtccaagcaagtgaatacaagaatattcacattgttgtgtaccgtatctccagaacttaatcacactgcaaaactgaaaccctgtacccattaagcaacttccttttctttttccctccaaacttctttcagtaaccattcttctttctttgtctatgggtttgactactttagattcctcatataagtggaatcacacagtatttgtcattttgtgatcagttcatttcacttagtataatgttttcaaggttcatcagtgttataaagtatgacaggatttcctttctaagactaatattccattgtatgtgtagaccacattttgtttgttttgccttcatattaagggcgtgaaaatttgttctcagaggcagctaaactattgatgactctttttggcaatgttaagttttgctctgtttttggttggtgctactaagcaatgcatcacctctgtcctttctgttcagctcttggccctgcaggaactatctcagcttggacttgcagagttttgtcctatgtctgcgcagcctagaacttggccacagacatacagtgaattcctacagtcttaagggtgcctctctcttgtgaattatcctgccctgcaaattccagccatttaagcagctcaaaactccaatatctgcctcctcattttagtaagactgctgttctgtttaggattcatttttgtgctctgtactagaamgtggtcctagatagaaagctagggtgatcattgcactcacctttgtattctctcaaggatcacaatgctgcctgtgtgttcctgaaaatagctgccttgtgtgtcttgccatgtgttgtattttgattggagagtaagtctaatgccattctgtcatggctggaagcagaaatatatttgtttttattaatataaaacaaattaatataaagcactccctgtttctcttcttttatccttatgcagtctatcttgatgatcttatccactcttaagagtttcaatactctttctgtttccttactttaacttttgttttttttagacggagtttcactcttgttgcccaggctagatagagtacaatggtgcagtctcggctcgctgcaacctccgcctcccggtttcaagccattctcctgcctcagcctcctgagcagctgagattacagcccccaccaccacacccagctaatttttttgtatttttagtagagacggggtttcaccatgttggccaggctggtcttgaattcctgacctcaggtgatccaccctccttggcctcccaaagtgctgggattacaggcgtgagccaccacacctggcctactctaactttttattaacttttcacctactaaaaacaaattactaagatgttagaatgtatttgtttactttgctcttctttttagttatctttgcatgaagtataatmataaaaaaaataagacaacaaagagaaaaaatataatggaatttctgatactgtgaagggtaaagaccatcacacaatttggacaaggttttggggaagatgtggtcatgtcatattcacaaaatatatctgggtaatagtctatttctcccgtgattccaggcatatgcacccaacagtccatttcgttattgcttatcactgcccaaaagttccaagaaatgatgaagtcagtctcatttggcatacatctactttttcagaaggaaacaaagcagagaaaaaattcyragagaaattcatagctagtaaccactctcacttttattttagtttccataactgaaattgctggacttgagagcaatttttccttgctcaacagaattaggtgagatggggaatcaatttaatatatatttagtgagcatctacagtgtcatggggcaaaaaaatagcaacttacaatattaatttctataggcagcccccaaatttgaatcatttcctgaaaaattacttctgcttttgtgaagtttcctgctagcagtttagagattgggctgtttcctcactgatacatatcccttcacacttctataatttaactctctcaactgcatgtgaaagatcttagctgaagatgactgacagtgttatttattccatgttagagttgcctacrgcaacccaagcccagaatgactayggaccacagcaaaaatgtgagttaaccaaggtagcatggaagacgatgcatagcarcagtaggctatggatgaatggggagtagaataagtttaaagcagagggtgcagaagaattgaggataatttgaggaaatacttttggttcagtttaaagtccagagttggaatatgaaaagttggtgtatggtacaggatctgatcttaggtctcaggtaaactcttttctaactgttcacttctttgatcgcatcttagaaacccaacttagggcattgccgttattccttcttgctcttagctaaagcgggaactttgttgggagaattttatctctttagttatattcggagtaaccttggaccagctgtttaaattctaggtatggctgtttttctgactatggaatgaggaggacaccaatagttttgctggtggatacgagtaagatttttgtcaggaaagaaactgatttacatatctagttttgttttttttttttaacttcacagtgttgcactagaatggtgacagggaagaaaaagtatcaagaaactacagataatagtctctgtgactgaggatttgaaggcaaaagagccatttttacatagagccctgagagaatattatctgagacagacaggtaatagtgtaaatgccaaaattaatccttgattttgtatcgtaggcagtgaactcccacaaggtgtattctttagggtagttccctaagctttctctctttttactacatagttttactattataatttttaatgtcttttgagagtgttgccttaatttgctaaatcattctagtatacttgggatatttagacctatttctattaccataaattatatagcattggatatctttatttgtgtaaccttttcctatttttgaattgtatctatgttaatttctaaggaatagaaatattacgttagaagtaatgcatatctcaaagtatatgttcaaggtcacacacacaactggtgataaattggaacctagttggaactatttagaggctttcaatatatacttaaagtaaattttaaaaatttactttacttcttgaattggcttgtggttacacaaattcaattatggtttgatacctttttaaaatttagcataacataaaaatgaacatttgtgtatttcattaaatgttctcctgtgatgcaaatgtatttttaaaagtttttctagaaatcttaatgcttttggattcatcagtccaaatatttattatgcagaattctctatttatgaaggcatctctcattatgaatttttttctttaagaagttcagaatactccatagatacacacatatatagaataatttatctaaaatttaatcagaaaattgaagcccaaataggcaagtttaatttcctaattaaatgttattaagcaaaggaatcaaaattagaagttaaatatcatcttacttcacagagttttgctcgttacacgtaatttctacactattgcactatgagatacctttgattttaaaataaagatttgctgaaaatacttccatttttcaaatttaaaatttagatttcggttgtatgcaacagctaacatgaagtagtgtcctattcttaaacttggcatcaacttaaacttactgctcttttaataacgacagtttacaaagcacttctgaaatgtagattatttttatttaaattttatgtatttcaatttcgagtagataatrtgtttacatggttcaaaattcaaaaggtacaaaagaaaatagggtaaaaagtctttttcctattttgtctccagtgactgttttttccattccagaggcaaacaatgttatcagattcttgagtgtgcttgcagagatatttgtatatcctgttctgcagaatgtttctttgtcttgactatatatcttacaaaatattccatatcagttaaaaaaaaaagccagtttttattagaagctatatattcactttatggatatatcaaaaatgtatttgactggccttttactgatagaatgtagattgtattcagtcttctcctcctacaaatattgctgccacgaataaatatgacattttgcacccgcgagtatctgtaggagaaatttctaggtcaaagggtacatgcctttgccgttttggtagatattgcccaattgtcctccaaagaggtaccaatttgtattctcaccacctaagtatgagacagtgtaagtcacagtttcaaaggaaaaaagcattctttatcttgataaatatagtaagttctttgatacaggtgttggtggttaccttagactttagagcaagttcctgacacatctagaaaaggaatctttatggcctggatctcagttcccactaggccaaattrctttaagatgcgatatccttccctgactttctcttttctttcaacctgtcatctgactcaggattgtgctttgactctgttgttgcagcttcctcttccaggccttcttgttcttgccttgtggcaatagctttggggcttctgactgcagttcttctgagtgtgctgctataccagtggatcctgtgccagggtaagtgcaaacttaaaccaaaattaatctttcattttatattataaaagcaatataacatagcagaagctttgaaaaatcaaaaaataattcaaacaaaataactctccatctgtatacagctatttcctgggtatagcctttgaccaygtgcacttgtgtaagcttgtattttcttttttctttttgttttttgagacagggtctccctcaatcagccaggctgtaggtgatagatttgtgtgctgctataccagcggatcctgtgccactgtacagtcacagctcactgcagccttgacctccttaggctcaagtgatccacctcagcctctcgagtagctgggaccacaggcacataccaccatgcctggctaatttttgtattattattattattwttttttttttgtaaagacatttcaccatgttgcccaggctgatctcaaactcctgggctcaagccatttgcccttcttggcctcccaaagtgctgggattataggtgtgagccactgcacctgaccatattttcttaatagaactgcagtcaagtcctcttaaaatttctcccacctttctttcttttaatgcaaggctgagaatagttcttatcgtagtatgctcataattttgtatattgctttttaattttatgttgccagaaacatttccttactgccatatttattgggatgattgaattataatattaatgatgtttaacttttcacataatagatatatcataatgtaatgaaacattctgaatttttttttttttttttgccattcaggtgctttcacattttctaaaactaatttttaagtttagttcttctaggaccttaaatctggtgatctagaggactctcagtttgttgttttacagtctagagtcctagcttaggtttatatttttaggggatgatagtgaccgattacacagaagtgatttattagggttcttttttaaatttttttaaaaattttgagacagaatctcgcaatgttgtttgggctggagtgcaatggcgtgatctcggctcactgcaacctctgcctcccaggttcaagcgattctcatgcctcagcctcccgagtagctgggattacaggcacctgccaccacgcccagctaattttttgtatttttattagagacggggtttcactatgttggccaggctggtctcgaactcctgaccttgtgatctgcccgccttggcctccccaagtgctgggattacaggtgtgagccattgcgctctgccgatttattaggattctaagagttcagctccagggcttctacctcagagccaagtccgacctttgacaaaaaggaactcctagggaagttgggaatttctaatccaggctgagtaatgtcacagttgtatggaaaaagcaaaatctataaggtgccaatttaacagcttgatctccagaacttatattggttgtatgccagtacttcctagagaacaattatctaatatttatatgaaaaatactactttccccactttgtaactcccaaatctagagtagatatatactctattctgcaattatatatctacacatgtgctcatggagtataatggctcatacttgctcactgtagaattgtgcttatggcgagtttatgcacatatgtttaagtattgaaactgaagtagaaaaatcaatagaattttggaatcttggttggaattaccttgaaagcatattcagttccctttcatctttgattgtttgtttttgagacagtgtcttgctctgtcgcccaggcaggagtgcagtggtgtgatcttggctcactgcaacctctgcctcctgggttcaagtgattctcatgcctcagctcctaagtagctgggattacaggcgggtgccaccatgcccagctgatttttttgtatttttagtagagatgaggtttcaccatgttggctagactgatcttgaactcctggcctcatgtgagccacctgcctcggcctcccaaagtgctgggattacaagagtgagccaccatgcctggtcagttccctttcatcttgacagaactatgaaccaaccattttaaaggaatgtggatcttccgtatttaaaagagctcggttagggcattctatcacttttcactttagcacctgttatgcttctctgccagaaaacccttttgaaaaatatcaaagtaagttctttttgctgaggtataagggtttttttccagttttcaatggtgagggacagttacatctgtgataataaaaaagcaaaacctttcattctagttaagtttgcttttcctaatttctttttggcattttcagttgggcattctgaatgattctgcctgatttaagcaatatacattatgcaattatgcaatatatacacagagcaaagacagtacacagatgcatatcatatgaattcacagttatctggtgtgtgtatattacatgtgcacagagatctctagcacaagtcaagtacttgctccagagttttcaggcagattgttgtatgctttcttctttgttccttcagttatagtcatattcttgtgtagtggaatatatacttagtagatgatggagttggacattatgaggacattatgaggtattcaaattgacaccacrcattgttacacatttctctaacccttaatctgaaaagtggtggagcagggaagacccagggctgccatattccattttatctcccatttcatttccaagactgagtggtccataaagatgtgaaccaggtcctcttctctcctaggctccaactactccacttgtgccagctgtcctagctgcccagaccgctggatgaaatatggtaaccattgttattatttctcagtggaggaaaaggactggaattctagtctggaattctgcctagccagagactcacacctccttgtgataacggacaatcaggaaatggtaaatgcaaacatttagaaaatgtagggtttttgttttgtttttgtttttgtttttaaactgctatttaaatgtatcatgtatcctcttttaaggaacagaaggaatctgtgatttgggggggatactatattcttccccttccctcttcttctctttcctcttctacttctgccttcttccctctccctccccactctttacccttatgctgtctgacccaacaaacctcagttacagcaacccagatgcttgtatagcatgtaagtgtgtatgtggggcaaggaggcagaaggatggtgagtgttttggagaggaatgagacctgaaatacaggtctagttaaaagaagtcttaggtccggaaacctacaggtccaacaacaaggcagcagattctttttttttttttttgacagagtctccctctgtcatccaggctggagcacagtggtgtgatcttggctcactccaacctccgcctcccaggttcaagcgcttctcctgcctcagcctcccaagtagctggaactacaggcgtgtgccaccatgcctggctaattttttgtatttttagtagagatgggatttcaccatgttagccaggatggccttgatctcctgaccttgtgatctgcccgcctcggcctcccaaagtgctgggattacaggcatgagccaccgtgccagtccttatatagtggaacttgggagggagggaaagatagagatcacggggacagagtgattgtggcaagggcttaaatgccttcttttaaaaagttttcccttaattcactggaatccaataagttccagactgcaatgttgagaaagttgggatataaggaagaaaacaygcgtgcacgtgcatgtgtgtgtgtgtgtggtggcctccacttccttcaggcccctcagatccttcctatccacccagcaatctcttggaaaagagcttgctattggtcctagaccatctcaaggcaatacaaggaactgacatcctgaggttgcctagtataaaaatcaatcaaattctaatttgtcaacataaataacatctataaggaaaacaagaaatcttagttttgtgttagtgctaatttgatactgatttttgtgttttgctattgttttctgttttcttttattgggtaggatctagtcacagagaacaatttattgagaattaaactatattaacttaccttgggaaaaatccagaggttactctaaagcagtgggggagaacatatagttcctaaattttatagctacctatataactacctatataaagcatacagattcttgttttctgccaaaggaacacttactcctttggaattccacatagaatctaaactctaaatcattccacatttgtgactaacttttttttttaaagccttctctaagtgaggtggcagaatgcattgagttgtattaattaaacatgagttcttagttttatggcctccagcaatatagccttgctttctggaccttgttgtagcaactcctattctcattctgatatagtgactctcaggatttgagctgactaaagtcagtagcagaagtgagccatgaacttgaaacattgagggcaaaactgataaacaggagtygtgagtcatagcacaagacactgccacagaaaattgtggtgtagcagctgctataaatttcacagtgtgatcatgagaggtgaggagggaaaggatgaagggcacagaatatctgggaaaatggcaatatttctgtttctctgaggaacccagaggaagggcaggatcattagagggattttgtccttcctctgcttcctgacatgcccccattccttagactattgttgagtaaaaccagcagagttacattcactgcatttccaaattgagtttattttctcctaaggctccttggggccaagtcagtgctggagagggcggaatgtccctgctagatgtcataagttttacttttaacattcctgtggaatcttacttgattctctggtttaattctttttcttgctccggcttttgtcagattctgtagaaccaaattgattttacgtgccctgctgcgtctgttgttctagtgttattattcttttgttctcagggcaagatttacatactattttgaggtatgtacaatgtttctagtatcatactggggtctgagccactaccaaaaaagcaagaagtaaaaataaaaaagagagctctatggatctattaaaactgaagtttttcaaactgacattccattggtggagagtgctgctagagaattttgttgctatatgtagaatctacaggcctatggaaaatatccctcttatgctgttaaacggtcatctttcagtgagatgcttacgtagagttcacctcctatcttagatcacttacggcaaagtgtacaataataacagaggctaccatggattgagcacttgctttttgccagatgttttatgtatagtattctttttttttttctttttgagatggagttttgctcttgttgcccaggctgaagtgcagtggcacaatctcggctcactgcaacctctgcctccagggttccagcaattctcctgccttagcctcccaagtaactggggttacaggcgcctgcctccacgcccgacctttatgtatagtattcttaatcgtcacagcaattctaaaaagtagagttcaacatccccattttgttggtgaatgaataaaattcagaggaattggctgggcatagtggctcctgcctgtaatcccagcacttttgagaggctgaggtgggtggatcacttgaggtcaggcgttcgagaccagcctggctaacatggtgaaaccccatctctgctaaaaatacaaaaattagctaggcgtgctgttatgcacctgtaatcccagcttcttgggaggctaaggcacccgaatcgtttgaacccaggaggtggaggctgcagtgagctgagactgcaccactgcactctagcttaggcagcagagtgagacactgtctcaaaaaaaaaaattcggagaattaatgagtgtaagtctaaggctacaaatctggcagagccaaattttaaattctactccagtgggcatggtggctcacacctgtaatcctagcactttgcgaggccatggcaggtggattgcttgaacccagaattcaagaccagcctgggcaacatggcaagaccctgcctctacaaaaaaatacagaaattagctgggtgtggtggcgcacacctgtggtcccagctactcgggaggctgaggtgagagaatcccctgaacccaggaagtagaggctgcagttagccgtgatcacaccactgcactccagcctgggcaacagagcgagactctgtctcaaaaaaaaaaaaaaatccacatcaactcaccttcaaagtcacttatagaaatatcgtatttgacagcttccagaatccattttgcatatgttcaacaagacaactttttctactaattgtcttctggtttcttttctatacatatttaaaaatttttttgaattgacatacagaatgtacrttgtatgaccgtggatatttaaatttatttattgtgatgaggtctcactatgttgcccaggctggtcttgaactcctgggctcaagtgatcctctcgccttggtctcccaaagtgctgggattataggcttaaatatatttaaaatagtgagatgctttcttattatctcttttttttttctatctgggacttcaagattattcttgatagagaaaataaaatggaaattaaatttctctgttattttctcatttttgtgttaacattatggcatcagcccttgcttcttcttgccctatgagtatatctttagatgtttggatatattcaaattcttgatttttcttgccatttttcccccaccaagctcagttcatcctggatgttgttagcctggttccttatagttattggtatgttattttaaagtatgcattcgttagtgagttcccagtgaaactgctttgatttctttaaatctattctgatgctccttgccctataatatctctcttcctcattatcataatttggaattatatgatccaactttactcttgcaacaacctctcattcaactttacctatcttcctgaccttgggattccccgagcttttgatgtcggcttctcacatatttaggatttacatctaataatatccaaagtttccttctttgggtgcagcaawgcaaacactatggtaacatggtcacttttctgtatatttttaatcaggtaatgaaaacagcttggtttctttcagacagtcatgagtgtgcttttactatatttcttactagctatgcgaacttcaacaactttcttaacctttttgactctcagtttcctcatgtacaaagtgaagataaaactttctagactgtccgggcgtggtggctcacgcctgtaatcccagcactttgggaggccgagatgggtgaatgatttgaggtcagaagttcaagacctggccaacatagtgaaacctcatctatactaaaaatacaaaaattagctgggtgtggtggcacgtttctgtaatcccagctactcaggaggctgaggcaggagaatcacttgagccccggaggcagaggtcgcagtgagccgagatcaggccactgcactccagcctgagagacagagtgatactctgtctcaaaaacacaaaaaactcaaaaaacaatataaagcccagagccaaaaataacttttactttgctcttctgtgtcccaagacatacaatttcagtaaaatatgcatcacagagtaaattatgacttgttgaattgagtatattgtttatgaggaaatctgagatgacatgtcagaagattcaaagaaatggctggaaacacagcatagatggtaggggaattgctttactctggaggtcttcacagtctggtaatgtgcatcttttgtcacgcttctttataatcagattaagcagctagtgtcaactgcataacaagggatgggcatgataagctaggatatttccactattttttaacttaaaaaattgtgggaaaatatgcatagcataaaatgtactattttaaccattttcaagtgtacaattgagtggcattaagtacattcacattgttgtacaaccatcactaccatcatctccagaactttttcatcatycccarttgaagctctgtacctcttaaacaataactcccctccctctagcccctggtaatcactattctacttaccatatctatgtatttgcctattctgtcctttagtgtctcacttattcacttagaayactgttttcaaggttcttccgtgttgtagcatgtatcaaagttatggctgaataacattctattatatggatatactacattttgtttgtccatttattcatcagtggatacctgggatgcttcaaccttttgactgttgagagtaaggctgctgtgaayttggatatccatctattgacagacactgtttccacaagcttttaaaaagtggagcaaatgatggtttacggagcagggcttactgacttttagcattgtgtacttacacaaaattatagggaaaattcttattgatattaasctctagtaatttgtaacctgtcagattttcctttgaaatttcttaacgttatttgcatgtttttagatgatggtaattaatgtgttcatattataggatatctgaaaagtctggaaacaggctaaacttatttttaaacagtatgttggttacattttcaagtaatatgctctatatttttactcaatcttgagacatgttttcaagtgaaacatctctaaatttaaagcaatagatataattatttttagaccttatgagtactctgtattgtaaatttttttcaaattagtaattacatcctttgctttaaatacttcacctgaaaaagtgtctgaagaaaaacatattaatgatattattttaaaatatragactgtagggttccccagtgcctggctttctttctgtgtattggctgaaaatcgcagagggccttgaccgctctgtgacccgcccagctacaggtttttcccctgcaggctctacccaaaccccagccttgaacatttccagtcactgataaaggtatctaggttgctgctcaaaacactgaaataaactagccccagccctaagtcagattccttaaaccctcataaaatctccatctctgaccccctggccgtggacatatgtaggtcaaatgctccttttctctggctgtccatcgtgagtgttgctgcagccctctgtaacttcccctaatagatgctttgcacagatcaccttgacatttagtgctttattctatggtatcccaaccaaccccatctcatgatgatttggggtcctcccttgtgggaattcccctgtcgctgcttttgggatgatttcagccatgggtttggtgggacaaaacagagatatactgcctaaaaatacatttatcctatgtttttaggtgttttggaacccattattttgtattctgcttttatcaaatagcattatttcattcttggtttttgctaagcattaaattattccaggtaataaaaagttgcaaccagattttattttattttttatttagttttaaatattatttttatacgtcttgcatcattccactattgcttaaatcttttcatattcttagataaaattctccttgttttcaattgtcatgagctgtgagcatatttatagaaatcattttgcttgcagttatttatttacattatattccctaaaattaagttggctaatcaaaagataagattttatagttttgatgtattattagtttttcttaatatgggttgaaataacttacatacattctgtaaaccattttaatttggaagtttaaggggtatgctttgtgccttaatgatattttaatttcaattaaaaatactacatacagaagtgtatgtggaaggtataaatgttgaactaaaaaagcaaaaaaggaaaagaaaagaaaaagtgcccttgattttatttgtttgggttttatcttcactttgcttttagggtttgcattttttctaaaatataagcaaacattacaaactctaagtgacataacacctaagtgttctagctcacaccctctctgggtgacaagagttctcagttaccacctttacctatacttttgttgttgttgttgttgttgttgtttgagactctcacccaggctggagtgcaatggcacaatctcatctcactgcaacctccacctcctaggctcaaatgaccctcctgtctcagcctcctaagtagctgggactacaggcatgtgccaccatgcccagctaattttcatattttttgtattaatggagttttgccatgttgcccaggctggtctcgaactcctgggctcaagagattttcctgccttggcctctcaaagtgctggaagtacagatgtgagccactgcaccagaccgatttgtactttcatgctgcttctatattctctctctttctaatacacacacacacacacacacacacacacacacacattatccatgagtacatagaatataaggttattgtactatggttttgaaggcctcttccaagtgggaagattttcgagtgaaagtgccataataaacattttcaatatccagcctcaccaatgagaagttgtaagaggactgactgatcaagtgatttagaattatatgggtcttgagggtagtaaatgagcacaggattggggtttgtacgtgggcattacctaatcctagctctgcagattctaactgaaatttctgagcaaatctttatcaatttctgtgcttcattagctgccgttcctcctcttgaaatgaaagaaaaagaaatggactgtttttctcattatcagtggagaaatggggaatcactctttttttccttttgttaattttatttattttttcaaatatttagcttacaatttttgatttgaatatactcaaattttatatactttgaatgcagtaacatttatttttgaatcttttagatcatggctatcattcacaccaattttgtgaaaatattaaaaaaaatccattctttttttcctaatttaaataattctttaaacaagttggttaagaaatgcaaaaattttaagctatcttgaaaattacagtgtcatttcatctgtcgtatacttcattcactctccggtctaccttcttacccccagcatgcacagttaagtgctccacagagagaaagtaaaaaatacagagtttgtgttcagagggttttttttttctttttcttttttattattattatactttaagttttagggtacatgttcacaatgtgcaggttagttacatatgtatacatgtgccatgctggcgtgctgcacccattaactcgttatttagcattaggtatatctcctaatgctatccctccccccttcccccaccccacaactgtccccagagtgtgatgttccccttcctgtgtccatgtgttctcattgttcaattcccatctatgagtgagaacatgcggtgtttggttttttgtccttgcgatagtttactgagaatgatgatttccaatttcatccatgtccctacaaaggacatgaactcatcattttttatggctgcatagtattccatggtgtatatgtgccacattttcttaatccagtctatcattgttggacatttgggttggttccaagtctttgctattgtgaatagtgccacaataaacacacgtgtgcatgtgtctttatagcagcatgatttatagtcctttgggaatatacccagtaatgggatggcagggtcaaatggtatttctagttctagatccctgaggaatggccacactgacttccacaatggttgaactagtttacagtcccaccaacagtgtaaaagtgttcctatttctccacatcctctccagcacctgttgtttcctgactttttaatgattgccatgtgttcagagagttttaacttcttgcagcataatacctaattgtgtgttctttatttctatagatacttattaaacataattttttaaaaaagagatgggatcttgctctgttacccaggctggagagcaatggcatgatcacagctcactttagcctcaaactcctgggctcaaatgatcctcctccctgcctctgcctcccaagtacatgtcaccaagtacaagcacatgccaccatgcctggttggctacattttttacttttcgtaaagatagagtgttactatgttgtccaggctggtcctgaactcctggcctcaagtaatcctctcaccttggcctcccaaattgctgatattacaggcaggagccactgtgcctggtctgcatttattgagtataattttatatatttttctaggtgctagggatatggtagtcgagttgttgctattataatgtttacattttatttattatttttaaggaaaatgatattttaaatttagttttgttattaacatttttttaaattggcacataataattatatatatagggtatttatccgaaggaaataaaatcagtatgttgaagagatatgttcactctcatatgtattgtagcaatattgacaatagccaagatatgaaatcaaccaaaatgttcaacaacaaataaatggataaatgaaactaacacaagaacagaaaaccaaacaccgcatgttctcacttataagtaggagttgaacaatgagaacacatggacacagggaggggaacatcacacaccgggcctgtcggggggtggggggcaaggggagggatagcactaagagaaatacctaatgtaggtgactagttgatgggtgcagtaatccaccatggcacgtgtatacctatgtaacaaaactgcacattctgcacatgtgccccagaacttaaagtataataataaaaaatgaaataaagaaaatgtgtatgtatacaccatagaatactaatcagccatggaaaataaagaaatcctgtcattcatagcagaatggatggaactagaggacactgtgttaagtgaaataaaccaggaacagaaagttaaacactgcatgttctcgcttatgtgaaaactaaaaaaaatgttgacctcagaacagacgatacaagaagctgagaatggctggggatggggaggttagggagagttatgttaaaggatacaaaattacagctagataggcagaataagttctaatgttctatagcaatggtctccaagatgtttagcaccaggcaccagtttcgtggaagacaatttttcyatggaccgttgctgggggctggtttcaggatgaaactgttccacctcagatcatcaggcattagttagattttcttaaggagcaggcaacctagatccctcacatgtgcagttcacgatagtgtttgtactcctatgagaatccaatgccaccgctgatctgctgatctgacaggggtcagaactcaggcggtaatgctggcccgcctagccgctcacctcctgctgtgcagcccagttcctaataggccacagaccagcaccttgcatggcctgagggttggggacccttgttctatagcactgcagggtaatctatagttaacaaccatttattgtatattttcaaatagctagaagagaggattttgaatgttcccaacacaaagaaatagtaaatgtttgaagtgataggctaattatcctgctctgatcattacacattgcatacatgttacgtgtgctttcattttcttcggaagagacagactaaataaatgaatatggtgatatgtgctttaaagaaaatgaaacagtatgatataatagtaaatgtgaatactattttagattggttagttaaggaaggcctctttggggagggaacatttgagttgatatctagacctgattgacagccatgtagaaatctcgggtaagatattccaggcagagggaaaagctatgcaaagaccttaaagcaagaatgaccttggcatgttaaaggaaaagaaagaaggctcatgtggctggaacctaggaagtgagtaaatggttagtaggggctagattgtgtaggactgtgcgtacatagtaaggattttagattttattctatgtgaaaagtgagactactggagaacattaatcaggggcacagagtgattaaaagtttagcactgggagagaaaagttggatgattatttgaaaaggagacttggatgaattctttcacccacatgaccttgtcttctcatctctaaaggtgaggataataatagttgcctaccttccaagattgtcaagaatttcataactggaaagaatcctagaaaatatctaacctaaatcctcataaagaagttgacgctcagccagattaaaccacctgcttatcttcagataggaggacagagctaggaggctccagaattttgtttctgctttgttttcctaaatgccatactgtatattcagtatttcaaatgatactgggaatgaacgcaaagggattttgcaaaccttagagtacaatacaaatgtaagagataattgttttcaggatactgggctctgagagaacaaagttatcataaggaatagattatttgggaagaaaagcactgataaacaagttgtactgatttttcaaatgctttgtctaggagccaccacagtcatgtcctgaatggaaacaggactgaaacccagtgaagagaaaatagaggttattctgaccatgagaaatagcacaaaagactccttttctctcctgtagtgtctccactagaagtgcaaagaggctttttgcctctctttattttattttgtttttttgagacagagcctcactccgtcacccaggctggagtgcagtgatgccatctcggctcactgcaatctctgcctcctgggttcaagcgattctcatgcctcagtctcccaagtagctgggattacaggtgccmgccaccatgcctaattttttatttttatttttgtttttagtagagacaggctttttgtaccacattcaccaggctggtctcaaacttctgacctcaagtgatccactagcctcggcctccctaagtgctgggatcacaggtgtgagccactgtgcctggccctcccttaactttagaagagcaactctttatttgtgctgatgcagggtccaagtaggcaaagagacarttaagagcagagcccataaatgtttactcttcagcaaccatctttcaggagtggaataaaaacaacatcaaaatgggacatctggtggtatcataatcaccataggcagttgaaattgtattgctttcttagtagtttctagataaaaaagaatattttattccaaaggtatttaaccaattaagctgtcwttagaaaatattgaaagtgtaattgttaattacaccaacactaaatcctacaacaaaattaccttggattatctttctaaccttttattttaatctattttaatctttaacattttattttatttcatttatagaggcaattctctttggatataaacttcttcatttgaatgtcagactttgcagatcaaagtcttttatctctgttctgttgggtaacgtggcacacataagtggtgtagccaatttacctttaccttaaacttgttcccttaagaactgtttttttcttgccacatacaagattgatgaggatgcggaaaatgagacctcagtggggaaaaaaacaagaatattgctataggcttaatcrtaatttatatatttaaggatgatgggaaagatgaccacttctgcagcaaaygtttagcttctttcttttgaaataatctgaatacctatcaggtgctccctttaattaaggagaaaattgcaatggaaggtagagatgtaatattatcttatttgctacattataagaatccagttattgacagaaaggtcaattcyaggatgctgctcctctctacagctaacacatctttagaattagatgttaaatgagaaattagttatttagagtgaataattgtcttagcttgggctgctctaacaaaataccatagactggatcgcttgaacaacagatgtttctctctctcagttctgaaggctggaaaatccaacatcaaggttctctggctcctggtgaggacctacttctggcttgcacatggctgcctttttgttgtatcctcacttggcaaagagagtgctttgatctcttcctcctcttataaggacactaattgcatcatggaggccccaccctcatggcctcatctacacctaattacttgctaaaggcttcaccagcagatttcatcacattaggggttaggggttcaacatattgattttaggacgcattcagtccttaagagtggtgatgatggaggctgtaaggaatgctagtttgtcttttaattaattacttaacttagtattaggaatccaatgtggaaaggaataattgtttgactgtgacactaggtcccttttttggttttcaacctctcccttagagcctgctccaagttttcctcagtgaggccttttgctggattggtctgaggaacaattctggctggaggtgggaagayggatcacctctaaacttctcaaggtaaggggcttcaaaggaatgcaaaaaaagagagagaggaaaaaggaaagccaaattatgatacttggggaatagataaagaagagcagatggagaggagaggaaagaatgaaaaggagaggaaatagggaamaaggaagggaatgaacaatgggtaagggcaaaaaaaaaaaaaaaaaggataacattttaaagagaggctgatgaacaattttaattcttctgctgtttgggggaattaggggcctgaatagggagacagaatttgcttcatttttatcccttcatgcctttcaactccttttctgtgcatgyggccttaagtgattgacttttctgatttcttacaggatttcttctaatagctttgtgcagacatgcggtgccatcaacaaaaatggtcttcaagcctcaagctgtgaagttcctttacactgggtgtgtaagaaggtcagactttgatagatgaccactctgtcctgaccctcagatctgtcatgtatccctaaaaggagggagctggccactggctgttgggaaagccatgagtatatagttagcaaatactgaactttctcagatatggcattagatgcaagacaacctcctagggattgatgcctaactgatggattctctttgagactatttagatattatgtgagcaatttaaagaccagatytaagcaaattttgaaatagatgtttgttttttgtatttctcagtatggaaactaatgctgccactctcatccccgtcccaaccatctctgtcaaaaatatacctttttcatatgatattctgagctaatctgataaaatctatgccaatatatactattgcttgtgtactagagaagtacattattgctgtactcctctgtacattactgatccctgatggtatatttctatcctaacagtgtccctttgcagatcaagctttattctgaagaataaacctagctggcatgctggtgtgtacctgtagtcctagctatttgggaagctgaggtgggagggtcgcttgagcccrggagtttgaggctgcagtgagctatgattgtgccactgtactccagcctgggagatagagcaagactccatctctaaaaaaaaaaaaaaatgctaatgtgagaatataaattgtgggaaatgagtgagggcaaggtggtacttcctcyttctgagctcttcacacgtaatgcaaaaacccggtcttaaytgattttgttttttttctgagtatgcatatatgtggttgaatgaaccaatgtgtgattgtatcttttccattatgtgactgtttgacctgcatattaatttcaagatagcagtcaattcgataaggcattttcatagaggaaagtttacagaaacagtttatrtggttggatcaccaaattatcttaggtactaaggcctcaaaaataagaaaaactttattatttctcctcagtagagtttggacatacataaggagagaaggtacagtgatgaaggagrccataattctgtagtgttgatgatcctggattataatctttttctctttatctttcatagtttttttaaaaacatggactgtatcttatctaccactatatcccaaatacctaagatagtgcttaygttcagtgactattaaataaataaatggatgaattaaaaagtaagaatgaaaactgttcattctagttatttctgttagcccataaattagaggaattgaagatgagaaaaacagtatatcctaatcctccctaactcaccaatatgagtcttcagtagctaactctacaaaggcaaagggccagttaatctggatacaatgctcatagaaggaagtcgtggaaacaagctcccatcccctagtgatctcttccctttggttctggtgcaggaagtatcccttagttatgratattttggtagtgactctcaattaaggatgtaatgatarcgattccatgtgggccatggcttggctactacagggtgcacaatttcatttacttattgaaagataagaaaaggagaactacagtcgggtcttaaattctcatctgagcaggcaggatgtgtgcagacctcctctgtgactagggttcaggccttttataaggattcatccacctattgtcagaattgggtgtagttcttcactgctttgtctcccttaaggttgttacaagagaagtaacagtttacttcctggttgcttatttattccttagacttatttakgaagggctggggtcagttagtaactcaattcttgcaccttacctagtgaaataaagtttggtaaaactagaaactaacattttttgattagcacttacattgcacagyggacttctttgatgaacattatacattaaacatatctgggacattcagtgtttggaataggacatttattaaagataataacagagcagtcacaaaattaaaatgaagaaaatccaggaacacacaggaggaggtggagcaagaacaagaagcctccactgatttttcccccgcaggaatacaaatggaacaattatccgcaaaagaaagcaccttcataagaaccaaaaatcagatgagcagtcacagtacctggttttaacatcatatcaacaaaagaggcactgacgaggacaggagagacagtcttgatttgccaatgccacccyttccccatctcccagcagcacagtgtggtgtggagagagagtctgtgctttggggaggaagagtgctgtgattatgggactttgcagtggaactcggtgcagctctgtcaaagcagatagcgacatgggacagaawtcagccmgtgcccacagagggagcatttagaccagccctagccacaggggaatggcccatcccagtggtcggaacctgagtttctgctagtcccaccactgcggctaaaacactctgggatcctaaataaacttgaaaggcaatctaggctacaaggaccacagttcctgggcaagtcctggtgctatgctaggctcagagccagtggacttggagggaatgtgacctagtgaaacaccagctgggtggccaagggagtgcttgtgtaacccctcctccgaccccaggcagtggagcttgcagctctgggagagactccttccttccacctgaggagaggagatggaagagtaaagaggactttgtcctgcaatttggatacagctcagctacagaaggatagggcaccaccacgcagagtcctaaggtccctattctgggacctagtttctggatgatattttaagacccactctggaccagaaaggaatgtgctgccttgaaaggaaggacccagtccaggcaggattcatcacctgctgactaaagagccctttggccctgaataatcagcagcagtacccaggcagtgtttgccataggtattgggtgagatccagtgccatgcggcttccagtgtgacccagcacattgttagctatggtagccatggggagagacttcttctgcttgaggaaattagagggagtttggacatagataaggagagatttaacccaagactaatggggactctgtcttgcagcttaggtattagcttggctacagtggggtagagcaccaagtaagcacctggggtccttgattccaggctcctggacagcatttctggacctgccctgagtcagaggggagggagcccattgccctgaaggtagagacccaggcctggcagcattcaccataagcttactgaagagtccttgggccttgagggaacattagtgatagccaggtagtggttaccacaagccttgggcgagacccagtgctatgctggcttcaggtctgacctagtgcactccaagttgtggtggccactagggtacttgtgtcactattccccaagctccagatagctcagtatggagagagagactccatttctttggggaaaagtaacagaagataacaagaggctctgcctggtaatctagtaaattctcctgtatcatacccaagaccaccaaggtggtacttctataagtctgcaagagtcacagtgttactgggtttgtggtgcttcctaatgcagatatagctgcagtggccaaagacttagatcataacactcaattccctttgaatgcttggagagttttcccaagaaggatgggtacaaacaaacccagactgcaaagactataataaaaacctaactctttaatgaccagacacaaataaacatccacaagcatcaagaccatcgaggaaaacatgacctcaccaaatgaactaaataaggcaccaatgaccaatgccagaatgcagagatatgaccattcagacagagaatgtgaaatagctgtttagaggaagctcaatgaaattcaaggtaactgtgttagtccgttttcatccttctgataaagacatacctgagactgggcaatttactaaaaaaaaagaggtttagtggactcacagttccatgtggccggagaggcctcacaattatggtagaaggtgaaaggcacatctcacgtggcagcagacaagagaagagaacttgtgcagggaaactccccttcataagaccatcagatctcatgagacttattcactataatgagaatagcatgggaaagacccacccccatgattcaattacctcccaccaggtacctcccaccaggtccctcccacaacatgtgggaattgtgggagctataattyaagatgagatttgggtggggcatagccaaaccacatcaataacatagagaaggaattcagaatcctatcagaaaaacttaacaaagagaacaaaaatttaacaaaaataagtttgaaaaatcaagcagaaattctaaagctgaaaaattcagttgacttactgaagaatgcatcagagtctctcaacagcagaactgatcagttagaagaaggaagctcaaagacaggttgtttgaaaatatacaggcagaggagacaacagaaaaaagaatagaaaagaatgaagcatgcctacaagatggagaaaatagcctcaaaaggccaaatctaattgttttgaccttaaagaggaggtagagacagagactggggtagaaagtttattcaaagggataacaacagggaactctccaaacctagagaagaatatcamtattcaagcacaagaaggttatagaacaccaagtagacttaactcaaataagactacatttaataattgaacttccaaaggtcaaggataaagaaaggatcctaaaagcagcaagaaaaaagaaacaaataacatacaaaggagctccaatatgtctgacagcagacttctcagtggaaaccttacaggtcaggagagagtggcatgatatatttaaagtgctgaaggaaaaaaacttttaccctagagtaatgtatccagtgaaaatatccttcaaacatgagggagaaataatgactttcccaaacaaacaaaagcagaaggatttagtcaacactagatctgttgtataagaaatgctaaagggggttcttcaatctgaaagaaaagaacataagatgcaataagaaatcatctgaaggtacaaaactcactggtaatagtaagtacacagacaaacagaatattataacactgtaattgtggtgcataaactactcatatcttgagtagaaagactaaaagattaaccaaaaaaaaawaactaccacaactttttaagacatggacagtacaataacataaatagaaacaacaaaaagttaaaaagtggtggcatgaagttaaagtgtagagtttttatttgttttctctttgcttctttgtttattcaatcagtgttaagttgtcatcagtttaaaataatgggttataagatattatttgcaagccttatggtaacctcaaataaaaaaacatacaacagatacacaaaaaataaaaagcaagaaattaaaacataccgccagagraaatcaccttcactaagaggaaaacaggaaggaaggaaagaaggaagagaagaccgcaaaacagcaagaagacatataacaaaatggcaggagtatgttttatcaataacaatattgaatgtaagtgaactaaaytctccaatcaaaagacagagtggctgaatggataaaaacacaagacccaacaatctgtcacctacaagaaacacatttcacttataaaaacacaagtagactgaaaataaagggagggaaaaagatgttccatgccaatggagaccaaaaagagcaggactggctctatttacatcagacaaaatagatttcaagacaaaaattataaaaagagacaaggtctctttgaccttatgataaagatgtcaattcagcaagaggatataataattaattgtaaataaatatgcacctgacactggagcacccagatatataaagcaaatatcagagctaaagaaagagatagaccccaatgcaataatagctgaagatttcaacaccccactctcagcattagacatatcatccagacagaacatcaacaaagaaacatcagacttaatctgtcctatagaccaagtggacctaatagatatttacagaacattttatctaatggctgcagaatatgcgttcttctcctcagcatatggatcattctcaaggatagatcatatgtttggtcacaaaacaagtctttaaaagttcaaaaaaattgaaatcatgtcarttatcttctctgactataatggaaaaaaactagaagtcagtaacaagaggaactttgaaaactatataaacacatggaaattaaacagtatgttactgaatgacaggtgagccaatgaagaaattaagaaggaagttaaaaaacttctgaaaataaatgataatggaaacataataccaaaatctatgggatacartgaaagcagtactaacagcaaagtttatacctaaaaccacctacataaaaaagtaaaaatgcctcaaatatacaacttaacaatgcgtcttaaagaactagaaaagcaagagcaaatcaaacccaaaattagtagaagaaaagaaataataaagatcagaggagaagtaaatgaaattgacatgaaaaaagatacaaaaggtcaatgaaaccacaagttggtttttttgaaaagataaaatcagcaaacctttagccatactacgtaagaaaaaaaagagagacgatccaaatgagtaaaatcagagataaaaaaaggagacattacaacaaatacagcagaaattcaaaggatgattagaggctactgcaagcaactatatgccaataaattgaaaaacctagaagaaatggataaattcctagacagataaaacctaccaagattgaaccgtgaagaaattcaaaacttgagcagaccaataacaggtaatgaggttgaagctgtaacaaaatgtctcccaggaaaataaagcccaggacccagtggcttcactgctgaaatttcccaaacatttagagaataactaataccaatcctactcaaattattatattttattttattttgagacagtgtcttgctttgttgcccaggctggagtgcagtggcacgatctcggcccactacaacctctgcctcctgggttcaagtgattcctcatgcctcagcctcctgtgtagctcagattacaggtgtgcgtcaccacacctggctaattttttcatttttagtagagatggggtttcactatgttggccagactggtcttgaactctagactgcaagtgatccacctgcctcagcctcccaaagtgctggtattacaggcgtgaaacactgtgcccagccctcaaactattttaaaaaatagaagaggagggaatgcttccacactcattctatgaggccagtattaccctgatacaaaaccaaagacacattttaaaaaatttcaaacagggaggccaaggcgggcagatcgcaaggtcaggagttcaagaccagcctgaccaacatggcgaaaccttgtctctactaaaaatacaaaaattagccaggcgtggtggtgggcatctgtaatcctagctactcgggaagctgagacaggagaatcacttgaacctgggaggtggaggttgcagtgagccgagatcatgccattgcactccagccagggcaacaagagtgaaactccatctcaaaaaaaaaaaaaaaaaaaaaaaaaagaaaagaaaaaaaatcccaaacaaacaaacccaaatgtaaatatccctgatagacattgatgcaaaaatttcctacaaaatattggcaaactgggttcaacaacacattaaaaagatcattcattatgacaaaatgggatttatcccagggatgcaaggatggttcaacatgcacatatcaatcaatgtgatacatcatatcaacagaatgaagaacaaaaaccatgtgattatttcaattgatgctgaaaatgcatttgataaaattcaacatcctttcatgataaaaacagtaaaaaattgggtatacaaagacatacctcaacacaataaaagccgtatatgagacagacccacaggtagtattatacgtaatggggaaaacctgaaattgtctcctctaagatctggaacatgacaaggatgcccattttcaccaccgttattcaatatagtactggatgtcctagctagagcaatcagacaagagaaaggaatgaagggcattcacattggaaaggaagaagtcaaatcattcttgtttgtagatgatgtgatattgtatttgcaaaaacctaaagagttcacaaaaaactattaaaactgattaacaaattcagtgaagttgcaggatacaaaatcagcctacaaaaaatcagtagcatttctatatgccaacagtgaacaatctgaaaaagaaatcaagaaagtaatcctatttacaatagctacaaataaaataaaattactaagaattaacaaaagaagtgaaaaccatacagtgaaaactgtaagacattgatgcaagaaattgaagcgaacacaaaaacagtagaaggatattccatgtttatggattggaaaaatcaacactattaaaatgcccatagtacctaaagcatcagatcagatttaatacaattcctatcaaaataccaatgacattcttcacagaaatagaaaaagtaatcctaaaatttatatggaaccacaaacccagaatagccaaagccatcctgagcaaaaaaaacaaaaacaaaaacaaaaacaaaactagaggaatcatattacctgatttcaaattatattacagagctatagtaactagaacagcatggcactggcattaaaaacagatacatagaccaatggaacagaatagagaactcataagtaaatccatacatttacagtgaactcattttcaacaaaggtgtgaagaataaacactggggaaaggacagtttcttcaataaatagtgctgagaaaactggatattcatatgcagaagaatgaaactagacctttctgaggctgaggtgggagatcatttgagctcaggagtttgagaccagcctgggcaacatagcgagacctcatctctatttaaaaaaaaaaaaaagaaagaaagaaagaaggaaggaaggaaggaaggaaagaaggaaagaaactagaccctcctctctcttgatatacaaaaattaaataaaattggattaacaacttaaataaaagacttcaaattatgaaactactaaaagaaaacattgaggaaactctctaggacattggtctgagcaaagatttcttgagtaataccccacaagcacaggcaaccaaagcaaaaatgaataaataggatagcatccagttaaaaacttctacccagcaaaggaaacaaagtgaagagataacctatggaatgggaggaaacatttgcaaactatccatctgacaagggattaataaccagaatatataaggagctcaaacaactcaataggaaaaaaatctaataatacaatttaaaaatgggcaaaagatctgaatagacatttttcaaaagaagacattgaaatggcaaacaggtatatgaaaaggtactcaacatcactgatcatcagagaaatccaagtcaaaactacaatattgtctcatcccagttaaaatggattttatccaaaagataggcaatgacaaatgatggtaaggatgtggagaaaagggaaccctcatacactgttggttggagtgtaaattaatacaaccactgtggacaacaatatgtagtttcctcaaaaaactgaaaatagaactatcatatgatccagcaataccactgctaagtatatacacaaaagaaatgaaatcagtatattaaagagatmtctgcactcccatgtttattgcagcactattcacaatagccaagatttgtcagcaatctaagtgtcaatgaatagaagaatggataaagaaaaatgtggtacatatacatgagggagtactactcagtcataaaaagaatgagatcctggctgggcacggtggccaggatgataggatgaatatgttctcttatatatccgtactcccatcttccccacctcaggaaatggctctaccatctactcagttgtttaaatatcaaactgaagaaatttctgatttcttcctttaaaaagaaaatacaaatagagatgggggtctcactgtgttgcccaggctggtctggaactcctgggcttacacagtcctcttgccttcgtgtcccaaagtgctgggattataggtgaaagccaccatgcccggctcttccttttttactcactgcatcagaaaactttcttgtctctgttaacaaagtgtattctaaatctcactcttttcctccattcccacttttcaactctttccaagctactgttgtttttcacctaggttactgtgacagattcttaatcattctttgtatacatatatatatatatacacacacacacacatacatacatatataaaattttagggatggggtcttgctgtgttgcccaggtcttgaactcctgggctcaagtgatcctcctgccttggcctcctgagtctctgggattataggcacgaaccacaatgcctggcacttcttcctttaaaaaataacttgattaaggtacaattgacatacaataagtgggatatatttaaagagtaaaatttgataagttttgataggtgtatatatccatgaaatcaccaccacaatcagcagagtgaatatatcaatttctcacaaaagtttccacatgacttttcataattcctctccctttcctccctgtcccctcaacactcattacccccggaattcccaatctactttctgtcactatatatcagacagcatcttctagagttttacagtacatagagttttatagaatcatatagtatgtacttttttttctggcttctttcactcagcataattattctgagattcatccatgttgttgtttgcatcaatattttactcttttttattgctaatattctactgtgtggatttaccrcaattaatttatccatttactctttgatggacgtttaagttgtttccagcttttggctattaaaaataaagctgttatgaacatttggatacgaatctttgaatggacatagtctttcttttttcttggctaaatgcctaggaagtggcatggctggatcatatggtagatgtatagttatgtattagttgaaaacaaggatgccttctgagaaatgcatcgttaggcaaattcatcatcgtggcaacatcatagaatgtacttacacaaacctagatggaagagcctactacatacctgggctatatgggacagcctattgctcttaggctgcaaacctgcacagcaagttactgtactaaatactgtggacaattgtaacacaatggcaagtatttatgtatttaaacacatccaagcatagaaaaaatacagtaaaatacagtrtaaaagataaaaaatggtacacctgcatatgacacttaccatgaatggagcttgcagattacagtataaaagataaaaaayggtacaccggtatatgacacttaccatgaatggaacttgcagactggaagttgccctgaatgaccaatcggtaagttaatgtaaaggcctagggcattactccacattactatagactttataaatattgtacgtttaagctacagtaaatgaaataatgaaataaccttagcttactgtaacttgtttactttataaacttttacatttacatttttaaaaacttttttactctttttttttttttttgagacacagttttgctttgtcacctagactggagtgcagtggcatgatctcagctcactgtgacctcygcctcctgggttcaagcgattctcacgcctcagcctcccgagtagctgggcctacaggcgcacgccaccatacccrgctaattttttttttttactctttttgtgatacacttagcttaaaatacaaacacattgtgcagttgtacaaaatatttttctttatatccttattctataagcttttttctattttaaaactatttttaatttttaaacttttttttaaaaaacaagacataagcatgcacattagcctcgggctacacagggtcaggatcatcagtatcactgtcttccacctccacatcttgtcccactggaaggccttcttcggaagtaaggcatggagctgacacctgctattataacaatgccttcttctgcaacacctcctaaaggacctgcctgaggctgttttacagataactatttttttttcttaataagtagaaggaatagactctaagataatgattaaaaatataagaaatagctgggtgccatggcatgtgcctgtaatcctggctacttgggaggctgagatggaaggatcccttgggcccaggaggttgaggctggctgttgagtgatatgattgtgcctgtgaatagccaccacattccagtctgggcaacatagccagaccccatctctaaaaaaccaaaagtatactaaatacataaacaataacagttgtttattatcattatgaagtatcatgtactgtacataattgtatgtgctatacttttacgtgactggcagcacagtgagtttgtttgcacctgcctcaccacaaatacctgagtgtttgtgcagtgtcttgagctacgacttcatggaatcacgaggcaatagaaatttttcaactccrttacagtcttatgggaacacagtgtatacatggttctttgttgacagaaacattgttatgtatatatggttcattgttatgtgtgcatgactgtatatatttggtcttcctcccatttcctgacatatagcttctaaaatccttgggatctccggagtggtaagagtgtcttatgtatgctcatgaatgactggtggctggaggctcctagatagttttaggatcgggggtggtcaccaataagaccaaggcatgatcagagggctgggatttttagccccacccctcaactccagggatgttgaaggttgagttgatcaatggccattaatgatggccaatgatgtaatcaattatgcctctgtaatatatgcctacgtgtgccactcctcaactccagggatgttgaaggttgagttgatcaatggccatcaatgatggccaatgatgtaatcaattatgcctatgtaatgaagcttccataaaaacccaaaagaacttgttccaagagcttctggacagctgaacaggtggtggtttcttgcaggtggtgcacctgtgtggggcctggaaaatctgtgccccttctcacatgccttaccccatgcatctcttccatttggccgttcatctgtatcttttgtaatattctttaaaacaaatgagtaaatgttaagtgttttcctgagttctgtgagccatccagcaaattggacctgaggagggtgtcarggatacctagatttaragccagtcagtcagaaactcaggccacatcctgtgcttgtgactggcattggaagtgggagacagtcttgtcaggctgagccctgaccttttgggatctgatggtatctccaggtagatagtatcggaattgaattgagttagaggacacttagctgctgacctctggagaattcactgcagaatcgattgcttgcttggcatgtggggaaaaatccctacacatttggtcacaaaagcattttgttgkgagagtatagtatgggagaaacagattttggtgttttttttcctattcaatcttttgcattatagcttattctttttgtatgttgttaaggaaatctttgcctagtccaaggccacaaaggttgccttaatgaattcttctagaaattttataattttaggttttacatttaggtcggtaatgtatttctatttaacttttttttcctttttttttttaagagatggtcttgctctatcacccaggctggagtgcagtggcaccatcatagttcactgtagtcttaaactcctgggctcaaaatcctcttgcctcagcctcacagctagctggaaccacaggtgaatgccaccatgcctggccaattaaaaaaaattttgtagagatggggtttcaccctgttgctcagacttgtcttgatctcctggccttaagtgatcctctagtcttggcctcctgggctgctgggattacaggcatgagccacagtatccagcctgtttttatataacttttrtacatggtgtgagatataggttgaggttttttttttcttataaatgcccaattattttagaaccatttatttaaataagtatcctttttccattgaattcttttggagctatgttgaaaatcaattgatcgtgaacacatggattttttttttttttttttttttttttttgagccagagtctctctctattgcccaggctggagtgcagtgggtgatctcagcttactgcaacctcctcctcccaggttcaagtgattctcctgccttatcctcctgagtagctgggatcacaggtgtgcaccaccaygcctggctaatttttgtatttttaatagagacaggggtcactatgttggccgggctagtctcaaactcctgacctcaggtgatccgcccacctcagccttccaaggtgctgggattacaggtgtgagccaccgtgcctggccaacacatgggtttatttctgcattctcttctgttcctttttaaaatatatctatcctgtcacttctaccccactgtaattttatagtaagtctataagtaagaatatagcrtagtatagttctccaactttgtttttctttttaaaaattgttttatctgttcttggtcctgagggttttactacagattttagataaatgttcttttcatacattttgcgtatgtgtgaatataatgggggaaatcactgagttaatggcaatatgcattttaaattttataagatagctttaaatggccccaccaatgtaaactctccagcgatgtataaatttgggtgcctatttctttataccctcacaaggcagagataaggtgaaccccaggctcttcatgattatgatgacttcacccctrgttccatttttgaaggataatgaggggtttttacctagaaggaggtctttcatattcttcacactggaacatctacaatacacatctttcccttgctagtaatgctctcacagggcaaagttttggtgatagtaaagtctttatttctatattagcactgagaagggaaaggaagtaaagaagagggaagaaaactggtggcacagaggaaagagcataaaaatgatgtggtaaaagctaaagaagaagtggttttcaagggggagggagcacttactagaacaaaatgccaaagagttgtaaagtaacataatgagaggagagtattcaatggaaatggcaatatgaaggtcatgtttatcattcttcactggtgtggtggtgacaggtgaaatttcagcaggctgatmatacaaggtaaggaartggaaacaatgagtttagatggtttgaagtctggttaagacaggaaggaaagagataatatctaagtagagtcatatgtcgggtcaatagatcttaaaatacagatagaagacagtaacacattttgtaacytgaggtaacaaaattatgttgaaagggagagattaaaaatgcatgtgggtgtggctgggtacagtggttcatgcctgtaatctcagcactttgggaggccgaggcaggcagatcacttgaggccaggagtttgagatcagtctggccaacatggtgaaaccccgtctctactaaaaatacaaaaattagctgagcacgttagcacatgcctgtagtcccagctactcaggagagtgaggcacgagaatcacttgaacccaggaggtggagtttgcagtgagccgagatcgtgcgattgcactccagcctggatgacagagtgagacttcatctcaaaaaaamcccaaaaaatatgcatgtgagagaggatgctttatagaccaagattcttgagtcagtggatgaatatgaagctgactggacaactggaagaagtaaccttgggtagaaagagtgccccttccccatggaagaaggaaagatgggtgaggattctgatgggtttattacaagtgatagggaagtaaactgttrttacctggtgaacttcattttctcagtgaaatcaaagacaaggtcatatactaagaaggagagaggaaataataggtttgggggtctatggacagcagaatttttgaataatcacaaagrggaaagagaggcatctgcctagagacacgacattgctgggcagccctgcgagcttgggtgaggcagggggccgaacattttcagtgatttcaatctgtactattgcacggtttttggcagcagccyacatgggatttgtcataataacagagaaatcaaatagcaagaaggatggagggagaggatgttacagaatggtttcaggggaagagaaaaggtgtcagaaaagagaagtagccagaagtaggcaagaaacccaaataatagggtccctgaagtgagggacatgtataggaaaakatttgggaataatagtgtaggagatgaaataaaacaccacagtgaacatttttgtacatgtattctgttttctcatgttttgaaagcatgagccaaaaacgtatgccaaaacaaaaatgttaatagataccactggattactttccaaaaagactgaagcagttttactgccactggcaacrgatgagggtactagtcctaggtccttctcagctccatgtgttctcaatgttttaaattctggctaattattattattactatttttgtgggggaagaaggatgttatagctttgtcatcatttgtgctttccacactattagtggctttgagcatcttctcaagtaagttagttatttgtatttcctctgagttacatgtttatatcctttggctattcactctatcagggtttttttctttttttctttttttgtcttttttcttwtcaatatgtaggcactctttgaggcacatgccacctgcttatttgtcagtcatatgtgttgcaaatattttatattatttgttttcttaaaacattatggagtgtttttttccttctattcatacattttaagttttaaaaaaatcgtgtgtgtgtctgtgtattttagagacaggtgctcacttttttgcccaggctggagtaccgtggtgtaatcatggctcactgtagcctcgacctcttgtgctcaagtgatgctcctgcctcaacctcctgagtagctgggaccacaggtgtgcatcactgtggctggctttttttttttaattgacaaataaaaattgtatatattacaatgtacaacatgttgttttgaaatatatatatacattgtggaatgggtaaataagctaattaacatatgcattacttcacatatttgtgtgtgtgaggtgagaacacttaaaatctattttctttttcttttttaaragagacgtttattcagcctcacgatcagactattccatttagcaatcaacagcatgggtgcaaaaaaaaaaaaagtctacattaaaaccctttgttggaatgctttatactttccacagaacagaaaccaaaataacctgttatacaattagtcacaaacacagtcctcaagttttttgcccatgcacatgagtatttgcgtaaaacatgtcttctttgtagcagctaggccttgccaccactgtgcttggctgagttcacaaatctgttgcctgtagcttccctgccacttctctggctctcttctcctgctaagctttgtttcctaattaaaatcttctgccactgccatagctgctgctgctactagaaccaccataggcaccttggtttcgtggtttggcaaagcattggcctccaccaccacaggggccagagcttctgactccaaagattcytcccttcatgggtccaaaatttgaaaactgattgttgtaattgccaaaattcattgtagcttccaccacctccaaaattgcttccatcattaccaaatccrttatagccatccccattgccaccatatccaccacaaccacagctgccaccaaagccaccatgaccatgaagttttctccactaccaaagttgtcactcccaccaaaaccacctccatgaccactaccaaagtttccagaaccayttcgacctctttggctagatgaagcgctagctctctcttgctttgacagtgctttcctaacttcacagttgtggtcattcacagtatggtatttctgaatgacagtcttatccacggagtcatggttgtcaaaggttacaaaggcaaagtcccttttcttgccactgccttggtcagtcatgatttcaatcacttcaatttttccamactgttcaaaattatctgttcttcagtgtcgtcgtcttcttctttttttttttttttttctgagacagagtctggctcttgtcacctaggctggaatgcaatggtgtgatctcggctcactgcaacctctgcttcccagattcaagcgattcttctgcttcagcctcccaagtagctgggattacaggcgtgtgccaccaggcctggctaatttttgtgtttttatagagacaggtttcaccatgttggccaggctggtctcaaacttctgacctcaggtgatccacctgcctaggcctcccaaagtgctgggattacaggtgtgagccaccacgccaggccttttttttttttgagacttagtctcactctgtcacccagactggagtgcagtggcacgatctctgctcactgcaacctccgcctcccaggttcaagtgattctgctgcctcagcctcccaagtagctgggactacaggcacgcaccaccacgccctgctaatttttgtatttttagtagagacgggatttcaccattttgtccaggatggtttcgatctcttgacctcgtgatccacccgccttggccccccaaagtgctgggattacaggcctgagccaccgcacccggcctcagtgtcttctttaatgccatcaacaaacatatttttcacagttaagtgggcacctsgtctttgagaatcttctcttgagaaagctctctttggttccacaaatcttccatccacttgtgtggccttgcattcgtggcygcatccacctcctccatagtggcatatgtgacaaacccaaagcccctgcaaccttggtgtttgggtctctcattacggcacagtccgtgagcgttccccattgctcacaatggctcttcaggctctcattggttgtttcaaagctcaaccatccaatgaagagcttcctccgctggtcaggctctttaggagactcagacttagacatgacggcagaaagaagagagaytttaatgatgcttcctcggtggtgtccaagggcagaaaggcaaaatctattttcttagcaattttcaagaatacaatacattgtgtgtgttttttaaaattttttatttatttatttatttttagttggagtttcactcttgttgcccagactggagtgcaatggtgcaagctcagctcactgcaacctctgcctcctggattcaagtgattctcctgcttcagcctcccaagtagctgggattacaggcatgtgccaccaggcctggctaatttttgtatttttagtagagacagggtttcaccatgttggccaggctggtctcgaactcctaacctcaaatgatccatctgccttggcctcccaaagtgctgggatccacggcccctggcctgaatacactgttattaactacagtcaccttgttgcacactagacctcttgaacttactcctcctctccaactgaaattttgtatattttgacaagtatctccccaatcccccctcctcattttaagtttaataaagtcaaaactgtcattttttcccccttattgtggattttggtattccacctagaattgcctgcttgggattttacttgtattttcccamaatttttttctaataagtctgtatttttaattaattaatttatttatttgagacagtctcactctgttgcccaggctggagcgcaatggcatgatctcggctcactgcaacctctgcctcctgggtacgagcgattctcatgcctcggcctcccgagtagctgggattacaggcacaggccaccacaccctaatttttgtatttttagcagagacagggtttcgccatattggccaggctgatcttgaactcctgacctaaggtgatccacctgccttggcctcccaaagtgctgagattacaggtgtgagccactgtgcccggccctctcttaagctggctttaattattatttggtttcacattttgatctttaattaatttttgcarttgtgataactaacttggaagagagragacagactgagttctgggcaaagtcttggatcattgagagggaaggaaaaggtttgaagatgaaagtgatgagaacgggtagtggatggggtgggcaggtggcacgtgcctcaaagaagctattttttgggtattgtttttattgtgataaagtgtacataatataaagtttatcactttaaccattttcaagtgtataattcagtgacattaattatattcaccatgttgtgcagccattatcactatccattaaaggaaccattttttttttctttttgacatggagtctcgcactgttgcccgggcttgagtgcaatggcaaggtcttggctcactgcaatctctacctcccggattcacatgattctcctgcctcagcctcccaagtagctgagattacagcagcccaccaccacacctggctaattttttgtatttttagtagagacggggtttcactatgctggccagactggtctcgaactcctaaccttgtgatctgcccgcctcggcctcccaaagtgctgggattacaggcgtgagccactgtgcccagcctaaaggaactatttttacatgataaaaaacaatggtatggagtcagcaaggaaaaccacaataacacaaatgctgactttcctctcttccactacttcyactctccttgcaacttagtagcctcattttgagaggacataattttaagaaacagttggcttgtagttaaggcaaagaggagtggggatgttctatgtaaaggttgataagatagggtaacctgttttcaatgtaacagggattgcagtgagcacaccagatagcatctcccggcagggggtagtgagagaatggtcaaattgtggaggcctagcttgcaatggcatgagactgtgggcagaaattaattttaacattttagaattaatttttgttggggatttccctgcagggctgctgcacgtggtgagggctcaacccctcaggcactcctgtgaggcccctggtcacccaggggcacctttaggctgggaggggcaaaagccctttgtcttcagagctgaaaaactcagtctctcatttagctttgaaaacaacagttcagttcctcagaatcaagataaattttaggagaaaaagcaatagaraattccctttagaatgcatctctgaattagaattaggatccttaaacaacaatttcctaggagaaaaccagctcagaataaatcaaggactgtcaamcaaagggaggtctggggctcaggaggacttacccgttccaccgggggagaagcttgaactcagtgggacttcaacgggcygctgctggtaccttagctctggtttcgggcaactctttcagggtcctgartcttctctgaggcctcatgtatttgggcaccaaaatattgtcaacaaaaagagtcaaactctataaaatatttgaagatttattctgagctaaatatgagtgaccatggcccacgacgcagccctcaggaggtcctgggaacatgtgcccaaggtggtcggggcacagcttagttttatatatttcagggagtcatgacacatcaatcaaacacacttaagaaatgcattggtttcgctcagaaaggtgggacaactcaaagcaagggcttccaggctaaaggtaaatttaaatcttttctggctgacaattggttgagtttgtctgacccgtattaatttcctagtgctgccctgacaaagtaccataaacttggtggctaaagccagcggaaatgtatggtctgacagttctggaggcccaaagtcaaagtgttggcagggatggttccttctgggggagaatctactcagtccactaatttaaatactaatctctagtggaaacacctgaacagacacacgcagaagtaatacttaaccagatatatggatatttcatggccctgttaagctgacacataaaattaatcatcacagaagctcacctatgattaattgatttttttgagggtgcaaaaagctactcagtgatgagtataataaaatattagaaagagtgtttttggttgactcagaattttggctaaaatctaaagctgagaacaataggtgttaagaaatcctatattccaaagagagttcttagcttaccctacaggactttccaaactggtctaaggacaattaccaacagcccatatcaggaaaagatagagactgattgaaaccacctttgcgaaattatgacagtaagagaaaactgacatagttgactccattttgcttctaagctacaagatgtcttcggtgattcctcagtgtaggccaaactaacttcaggaggcacttaatttatactttaaccttagagcaaagatgataatagccctctcctaaaactaaaccacctctgtaaaactaatgaaaggccacaggttaggattaggaattatgagaggggcctgaattctgctaaaatgtaggcaaagtgaaacgataaccagccattgttctggaggtcacaagatttgtaacttccccaattactcctgtagatgacatcaactgttatagaacccaagattggccttttgagatttttttcagactgttaacgtttctcatgaccagctgactcgggccagacctgcaactcatgagtcaatcagtcctgtagccctacccagaggccaattcagtgcatgaagactattttccacactcctatgattttaccccaatcaatcaatattccccattctctagccctctgaccaccaactatcctttaaaacccccaaaactttgagccttcagggagactgatttgagtgatatttctggttctactacatgagttagcctcctgtcaatcaaactctttctttactgctatgccgtagtctcagtgaattgattttgcctgtgcagagggcaggaagaaactgccggtgattacatgattgcagagacaaattccttgaaagaatttgtgaatcaaaagattgctggggtctgggtgtagtggcttacatttgtaaccacagcactttgggaggccaaggagggaagatcgcttgagcttaggagttcaagactggcctggggaacgtagaaagtcatcatctctaayaaaaataaaaaaataaaagaattagctgggcaaggtggtttatatctgtagtcccagctactagggaggctgaggtgagaggatcacttgagcctgggtgatagaggctacaatgggctacaatcataccactgcactccagctagggtgacagaatgagactcttwaaaaaaaaaaaaggggattactggrgtatttcccctcccaccctgattccaagtgagaggggaaacaagagggcactttggggaaattgggcactgcttgctgaaggcagacagagtcttactycttggctctatgcttgctcagctatgggagcttgtaaatttgagacagcatggagaataaaaaagtgtttggaagaacctgacctatgtcccttactgaagaggacaaagacacttttgtgtgactattgtttagagaggcccagtggtgagaagttagcagaagttgctcctgatgacagggtaaggtggggtggcttcaaggctcagcttcactatttggtgagtgggtatatgagctcccctcatcccagaagtagcagatgtgggtttgcgtcctctacaaagggctttatccaagaggactccctatcggtgggagatcctacaagaaagaagccatgttggatgcttcactagaagttgagagctaaggtaaagtcacaggaggcctcccagagagcatctcacctgtatcagggaatgatgcagtgcagaaattcctcagggatgtatctctgtgtaggatctcctaaaaatccattgaagaaccccatgagagacaattggtatttgtgtattgtatcagtcaggtttcaaccacagaagcagaaccagtagaagagatacatacagtcatgcacagcataatgatgtttcggttaacaatagatcacacatatgccgtaattatatccataagattatagcgaagctgaaaaattcctagtgacatcctatctctagggacatcatagctgtcataacatcacagcacaacacattactcattactcacgtgttcgtggtgatgctggtgtaaatgaacctacttcactgccagtcatgtaaaaaccatagcacatacggttatgtatgatacataatacctgatgataatatgtgcctctgttattgatttatgtacttaatataccatactttttttttttcttttgagatggagtttcactcttgtcacccaggctggagtgcaatggtgtgatctcggctcgctgcaacctccgcctccccrgttccagcgattcttccgccacagcctcccgagtagctgggatttacaggcatgcgccaccatgcccggctaattttttgtatttttagtagagacgggtttcatcatgttggccaggctggtctcaaactcctgaccacagatgatccgcccgcctcggcctcccaaagtgttgggattacaggcgtgaggcaccgtgcctggccattatactttttactgttattttagagtacattctttatacttatccattaaaaaatttgttaattgtaaaacggtcttgggcaggcccttcaggaggttttccagaacaaggcattgttatcacaggagaggacagcttcatgcgtgttactgcccctgaagaactcccagtgggacaagataaggaagtagaacagtgatattgatgatcctgaccctgtgtaggccttggctaatgtatgtktttgtgtcttagtttttaacaaagctatttaaaaagtaaaaaaaaaattaaatagaaaaaaacttatataataaggatataaagaaagaaaatatttttgtatagctgtacaatacatttgtgtggtaagctgtgcgttcatacaaaaaagtgtagtttggagatttctcgaagaacttaagacagaactaccttggaaccaacccaaatgtccatcgatgatagactggataaagaaaatgtggcacatatacaccatggaatactatacagccataaaaaaggatgagttcatgtcctttgcagggacatggatgaagctggaaaccatcattctcagcaaaccatcacaataacagaaaaccaaacaccacatgttctcactcataagtgggagtcgaacaatgagaacacatggacacagggaggggaacatcacacaccagggcctgtcagggggtagggagctagggggagggatagcattaggagaaatacctaatgcaggtgacgggttgatgggtgcagcaaacaaccatggcacatgtatacctatgtaacaaaactgcacgttctgcacgtgtactccagaacttaaagtaaaaaaaaaaaaaaaagacagaactaccattcaactcagcaatctcatcactgagtatatacccaaaggaatataaattgttctaccaaaaaggcacatgcacgtgcatgttccttgcagcactattcacaatggcagagacatggaatcaacctagatgcccatcaacagtggactggataaagaaaatgtggtacatctacaccatgaaatactacacagccataaaaaataaaatcatattctttgcagcaacatggatggagctggaggccattatcctaagtgaaccaatgtaggaacagacaaccaaataccacatgttctcacttataagtaggaggtaaacatttagtatgcagggaggcagagtggaacaaaagacactgagggctacttgagagtggagattgggagagagtgaggatggaaaaactgtctattgggtactgtgctcatacctgggtaacgaaatcatttgtacacccaacccagtgacatgcaatttacccatgtaacaaacctgcacatgtacccactgaacctaaaataaaagttaacacaaaaaggaaaaagtttattaagtaaaaaaattagaagaagctaaggttaatttattattgaagaaagagatttcacttcacggcagctgtggcctgactgtgaggcggctgaccagcctcagctgagagtggagtggtggccgtggccctccttaggagatcaccatatcacctcttactgtggccttaccatggcgacctatgggcagacctgcatgtggccagtgtggatttcttcatcatatgttaaccttggcaaagctgccagagatatttttaacaaaggatttggtttggggttggtaaaactggatgtragaacaaagtcacgcagtgctgtgggattttcaacatctggttcatttaatgcagacactggaaaagcttttgaagtcttggagaccaaatataaacggtgtgagtatggtgtgactttcccagaaaaatgagacactgttaatactctgggaacagaaatcacaattggaccacctttgtcaaggtttgaaactaatatttgatactaccttcttagcaatcacaggaaacaaaagtggtaaaatcaagtcctcttgcaagagggactgcataaaccttgcttgtgatgttaattttgattttgctggacctgcaatctatgcttcagctgtctttggttacgagggctggcttgctgggtaccagatgaccactgacagtgccaagtcaaagctgacaaggaataactgtagtgggctaccggatgggggacttcgagcttcacactaataacaataatggggcagaatttggaggctcagtttatcagagggtatgtgacaatcttgatacttcagtaaaccttgctcggacatcaagtgccaactgcactcattttgtcttgccactaaatatcagttgcatttcactgcttctatgtttgcaaaagtcaacaactctagtttaattggagtggaaggaaagagacttcatttacactcagactctgagcctgctgtgaagcttgcactttctgctctgctagataaaaagtgcattaatggaggaggccaaagacttgggtttgtcctggagttggagacttaatccagctgaaagaaatggcaatggatatcagaagatttggctttaatatactttcattgtgatcagcaggctcttcccacaaagaaggtgatcaaaacaaaggctctaaacaagagctatattttaaatatttaaacagctactcgttagctggtttctagttgaattggttatgtatytagttaccaatatgctgcaaccgtgcagtcacctacacattatttaagtatatttaactgttamatgcactacccaccaatcatgaaataaactttatgaaaaaaattttttaaaatgaatttactatagcttgagtatacagtgtgtataaagtctacagtaatgtacaataatgtcctaggctttcacattcrctcaccactcactgactcacccagagcaacttccagtcctgcaaaccccattcgtggtaagagccctatcgaggtgtaccatttttaatgttttatactgttttttgatggtaccttttctatgtttagatacatttagatacacaaatatgtgccattttgttataattgcctacagtaacatgcagtccaggtttgtagcctaggagcaattggctacaccatataggccaggtgtgtggtaggctcttccatctaggtttgtgtaaatacaatctatgacctttgcacaaaaacaaagttgcttagggttacgtttatcagaacatatccctgtaattcagtgatacctgtgttaaaagatgtactgcagtggctcatgcttgtaatcccagtgctttgggaggccaagacaggaggattgcttgaggccaggagtttgagaccagcctgggcagcacagtgggaacccccaatccttacaaaaaataaaaaattggctgggtgtggtggtgcttgcctatagtcctacctattcaggaggctgaggctggagactcgcttgagctcaggagttcaagatggcaataagctgtgattgtgccacagcactccagcctgggcaactgagcaagaccctgcaaggaattggctcatggctaggcaattccaaaatccataaggcaggctgccaggaagggcaggctgggactctctagcagaagccgaagctgctgaagctgctgtctataggtagaaattcatgtttatcagggaagccttaattccactcttaagacctttcaactgatattgaatcaatttcacctagattatctaggatactttcccttacttaaaatcaactggttacggactttaacgaaatctacaaaataccttcaataaatatctagattagtgttggattgagtaacaggggactattgcctagcaaagttgacacatgaaaaaaccatcccaggtaacttccacacaaaatcatggccagagaacaatagtaccagagcaagacttttccctcttctttgaattccccatctttgaggctggagggctgcatcactcccccactgctggtttgtgagagctgtatgtagaggaaaacaaaaattagccgggcgtggtggcaggcacctgtaatcccasctactcgggaggctgagacaggaraatcgcttgattctccacccaggaggtggaggctgcagtgagcagagatcgtgggctgcactccagcctgggcaacaaagtgagactctgtctcaaaaaaaaaaaaaaaaattgaaacaaaaaatgaattggttataagaataacattttgatttagattggattaaactttctcagtcaaatgagactgttagagtagcttaaatttattagaagagctaaatgatttgtctgataagttgtccaagggtatggaggctctggttggagaataaagctctttcctgattgcaatatatgaattctgttcattcaataagttggtcatatgtataaagtagacgattgctaaatataacattagttatcaccttcaaagcttatctcttcgcctccgcgtctattctctttgtcctctctcatttgttgtttttgatggctactctatgcttttactgagaatagaagaatgagaaaaccagcttagattgcgtatgtgaaatactagaaagtgagattgtattttccttctctgatgactttacaaatagaatgattaaaaagtatttttytctaataatttgtgtacacagaaacttaggattgacaaaacgatcttatttgttcttgacatatgtataattttatgcttttttaaaaaacttttttttctgttcatggccttttcctctgtttcttcttcctcatgacaccactttaacaactgatgtcttactacacattattctcattatctcattataggatttaactgccctctttcggtcaatgccagtaattgcaccattaatgacagttgctaaagcagtcagtccagtgacttttcagagggtgctgagattacagattctcttccaggattctttgtttgtttagtagccaatcaagggtaaagtctcttctattcaatcactagaggaaaaaccattttctcactaccttgattctagaaaaatttgtgcattcttttgataatactcagacacaaatarttctttagtggccattcaattattccctttgttactgtacatttccaagatagattatttgattagcaaaaatgcctgcgcaatgcattcaggttattgccaggtatggacactactagaatgacagtgagtaagagagaaaaaagaaatgatacctttcagtaagaaggaaaatggaactatcaataatagaaggctaattagtaaagaaaaagtcaagagaagataagactgagaaaaacttcagattcttaataaaaagaaggcactcaattataggaaagtaaactttctgaaaagtaggagagaaktaggatagtggtaaatttgctaccattttgaaatggtccataatcatgaatatataatttcagtatatggcacagactcattacagaatcacacagtgctaagttcctaggccttgtctgtcctcgaacaatagtatataatttaacttctctcgcctcatcttgacagataaataccatgctatccatttttctgtttaagcgccttctgtgttgggctatccaagtcaggaaatctttccttagtattctgtaggacccattaggttgaaatcaggaggtttttcaccatttgatggtttggatctataagaaggacactttcatattgttcaacccaaatatttattgtcctgtcatgaaatagcaatgatatatttggaatgtcagctagcttttctgtccagtgcctccctcccatcttcatctcrgatattaaattttactaaaacttacttttatttagaatgtaattcttctgaatcactttcagactttctgtttttatatgtggttgtgtggtctgtgacatcacaggacattttctgaaagggtgcctcactattgtctctggggttgttttccaaactattgaaaactattctgcagatcttcatgctcaaaatgttttgatcttacaagaacttatcactgaaagatttcaaacaacaactagaattcagattcctttttcaactgcttattaaacggttcattgattgaaacattgagagattgtagttgttcaatgggaatgtcaatgggaagacaactaagtttatgcatgaagagggaaaggcaagtgaatcacgaccactgcccacctgacagcagctgtgyaaaatgctgtgacagactgtttccaaagatgcacatcactgcgtatcttccaacagacatgccctttaaaaacaactttattgccaggcgtggtggatcatacctgtaatcttagcactttgggaggctgaggcgggtggatcacctgaggccaggagttcaagaccagcctggccaacatggtgaaaccctgtctctactaaaaatacacaattagccaggtgagatggctcatgcctgtaatcccagctacttgggaggctgaggcaggagaatcactcgaacctgggaggcagaggttgcagtaagctgagatcgcgcctctgcagtccagcctggcgaaagcgtgaaactccatctcaaaaacaaacaaacaaaaaaacaaaacaaaaaacttggttgatatgtaattgatgcactataaactgcacctgtttgacatgcgtattttgatgagccacaggattttttgccatgtgtccttgatactgcttctccaagaatttgagtctatttttactattcttgaatccagtccagccctgtgactcacttgaccagcagagtgctgtggagctggtgttgtgtgtcttggagagctaggttatagaagcctggcaacttctactgtctcttggcacatttgcacttgggacccctgacctgccttgtaacaagtgtatctacttgctggagagaccaggtagagaggacctaagtctatttggagagtgagaggtcaagttatcccagcatcctaatcaaatcttcaggtaattccagctctagctatcatctaactgcttgaggtaccccatgcgagaccactcaccttaccccagtcaaccatagaaccatgagaaataagaaaatgataattactttaaactgctaagttttggagtggtttgcgtgcagcaatttatcaccaaaacagagactggtactatgaaaggctgatgattttacaaaaatctaaaatatgtggcattggtttggggaccaggtgatgagaagaatctggaagggactctaagaaattctttgtaaaggctrgaaggacaaggaacacattttttattgggagctagaaaaaaggtcgcttgtgtaatgtagtggcaaaaagtttagcaatgcttcagcttgtgataaggtggctaaggaagtatctacctaggatgttgaatataccagctcgtttcttttagctgcatgtgataaggtaaagatggagatgaactaaagaagtaactgctcagttttcaactagaatctagaggcaacacatttctttgccagattttttaggattgaaaacaaaactgtttctcatctccattctcttccagtaaaagattattaaagtaataaattacaacagagcaaaagatcaaattcagggcactgccactaaaagtatggcctcagggtcaagatttcaagattacagctgtagacctttgtgtagacctcagaaagatttaaaataatgyctcctgaaccctctcagctaggcaaaaagtctactaaaaatcccaaggacgtgtttcttagaccttttctgttaaaggcttcttagaaacttaagagcattgttacccagcacttttcttctcagtcaaaggtagagagggacctgtcytatgatttatcagtgtggcttttgtttactggaatggttatagattgatagaaaagaagtccatacagcttttaaaagaattctgctgccttgtactgaaagggagagacagttgaaaataaaaaaataaaaagaggcctctgagtcttcaaacttttatagtcaggaagcagtttgatattgaccagcaaatatgggcaatgtcttatagaaaaggaaagataacttaaaaggaagatcttagaacccagaaagcagagggaagaggaatggagaagcactttgatgattgcaggactgggccctcatggaggaatggcgatgtgttcccagccagaattgctatgatgagtgattgctatgtgcttcctgttctctcaatttttttgaataggaatatttatgcccttatcctttctttgtctcaccatcttttttgggtttgtgtgcatggcagatatctttttttttttttttttgagatggagtcttgctctgttgcccaggctggagtgcagtggtgcactcttggctcactgcaacttctgcctcccagattcaagcaattctccctgcctcagcctcccaagtaactgggattacaggtgcccaccaccacgccggttaatttttgtatttttttagtagagatggggtttcaccatgttggccaggctagtcttgaactcctgacctcaggtgatccacttgccttgggctcccaaagtgttgggattacaggcataagccaccacatccggctgatatcttgtttcttaagttcaaatgtcttcgggttgagatatcttgtctcctgtgctcaaggagtagtacctaaggaagttcacccaaaggactccattcacatctgatttaggtgatgaaatcttagacttatgcttaagaagatgaggcttttgaggaagaggctaagtgcattttgtatgtgggagagagatgaaatttgtggccaaatggcagctcataacaatgtgtgtttccaaaggtggccacaataatatctccaaccacatgctcttttgtaatgtgatcttgctactcctccctcaagaggtgaaatctgtttcactcttcttgaatcctagctgaccttatgatgtacttgactaatcaaatgtaatggaagtaatacatgacttctgcggccaattcaaagaaatcttgcagcttcttcctatagtttttgaagctcttgttcttgggagctctgaaatgccatgtaacaagccaagctactctgttggagagaccataaaatgaagtcctgagactacatgcagggagagagagaasaagcagtctctcagaatcccagtggagtctccacgtgactccaatcccagctgccatctggctgcaatttcatgagagactcttggcaagaccatgagaaaaatcatccaggtaagccatgtcaacccatgaaactgtgaaatatatgaaattgttgttttaagcaaattagattttggggtggttttttatacagtaacagataaatgaagcagatattaatttattgtaatatgtgtcccaatttcaaggatcttaaaatgtaaacaaagtacaacttagaattgatgaaatagaaaaaaagaaacgcatgcaaattatatgaataggtaatttgtagaaaaagaaatcccaatggctagtatgaagagacgctttactcctctagtaatcaaagaaggaaaagtttaaacaatcaaaaaataagaatttttactcaaaaaaagtacaaacaggcttggcgtggtggctcacacctgtaattccaacactttgggaggccgagacaggtggatcacttgaggtcaggagtttgccaccagcctgaccaacatggtgagaaaccctgtctctactaaaaatacaaaaatgagccaggcgtggtggcgtgcacctatagtcccagctacctgggaggctgaggcaggagaactgcttgaacccaggaggcagaggttgcagtgagccgagatcaccctattgcactccagcctgggcaacagagtgagattccatttcaaaaaacaaaaaaaaaaccccaaacaattagaaacctagatagtggtaaatattggcaagaacacaggggaaatgagacctccttgtatactactagagggagtatagatttgtgtagcattctggttgaatagtaaatttaagttagtatatatcattttattcaacaattcttatcctggctttataacccagagtaattatcacataggctgataaattgacatgtattaggatattcagagcattgctgtatacagtagaagtatcataaatatctgtcactaaaggagtgaataaaattttggtggctgcaaattattttagtggaatactatacagaagttagaagcatgacacaaaacatgcaaatagcaacacagaaagaggctgaaaagtattgaaggacttctggtttctggcatgacttataaagagcttggaagtcaccactgccaccctcacaacaaggaaaaaaaactgaaatactgaaaatcaacaacttttcttagatccatcaaagaattgaggtaacgggcaaaccatcactcagaaaactgagagagagaaccacagttttgcgagagaagataccacagctgtcatcggacctgtgaggcttagatcctatttaagaagtctttagagaagcccaaagacaaaaatgacgacagaggaaattttagcctctaataaagacacagagagagtaaacacagccgaactcctagatagataaacataaaacctcatgataacttacttcagtttcttttacccaatatataataatctagatttctacaaaaaattacacagcactttaaaaggcaaaaaacacattttgaagaggccaagcaagtacaacaagatgaagatatgacagtgattttggaattaacaggctggaaatttaaaataatgattattatgctaagggatctaatagaaaaagtggacaacatgcaagaagagatgggaaatatcagcagagagactgaaactctaagaaagagaaagaaagaaatgctaggaataaaagtacagtattctattataaagatacatgcacacatatgttcattacagcactattcacaatagcaaagacatggaatcaacccaaatgtccatcagtgatagaccagataaagaaaaygtggtacatatacaccatggaatactatgcagccataaaaagggatgagatctttgcagggacatggatggagctgaaagccattatcctcagcaaactaacacaggaacacaaaatcaaacaccgcatattctcacttataagtgggagctgaagaatgagaacacgtggacacggaggggaacgacagacactggggcctgtggggggcaggtgggagagcatcaggaaaaatagctaatgcatgctgggcttaatacctaggtgatgggttgataggtgcagcaaaccaccatggcacacatttacctatgtaacatggtctggacatggctgaggaaagaatcagtgagcttgaaactgaaaatttcccaaactgaaagccaaagagaagaaaggctgagaataaaggaacagaatatccaagaactatgggacaattatgaaaagtataatatacacataatgggaatagcagaaggagaagaagataagggaacaaaaggaatacttgaagtaataatgactgagaattttccaaaattaccaacagacaccaaactacagatccaggaagttcagagaacaccacacaggatacataccaagacatctgcacctaagcatgttatgatcaaactgcagaaagtcaaagacaaatagaaaatctagaaagaagctagagtgagggaaagccttgcttacagagagcaaaggatgagaattatagcagatgtctcttcaaaaaccatgcaagcaagaagagagtggagtgaaatatttaaagcattgaaagaaaaaagtcaccaacctagaattgtatatttaggtaaattattctttaaaaatgaaagaaattaaaaactcagaaaaacaaaaattgagagaaattgttgccttccaagaaatgttaaaagaagctcttcatagaaaaggaagatgatataggtcagaaacttggatctatgtaaagaaagggagagcatttaaagtctttcattttcctcattcttgttcttcatttttwaattatttttatttttttatgagacggagtcttaccttgtcacccaggttggagtgcagtggtacaatcacaggtcattgcagcctcaatttcctggactcaagtgatcttcccacctcagcttcctgagtagctgaaactacaggcacgtgccaccatactcagctaaatttaaaattctttatagagataaactcttgctatgttgcccagactgtctcaaatccctagcctcaagtgcttttcctgcctaggcctcccaaagcattgggattacaggcatgagacaccacacctggctttattttttattcttaattgacctaacagataacagtttgttcaaaagatttgtagcaacaaaatattattagtagcaataaaacttatagacatgtgaaaggtgtgacaggaatgttataagggacgggagtgaggtattggctgttctctcttataaggtatgtgcaccacctgtgactcagtgtagtgttatttgaaaacagacttagattagttgtaaatgtatattgcaaactctaggcaagcactgaaaatgtttttttgaaataagtataattgatatgctaagagatgagacaaaatgaaataatataaatttctcagttaaaatctgagaaggcaaagaacaagggaaatgaataaaaaacaattaaaataaggtagagattaaatctaaatatatgaatgattaattagaatgtgaatagtctaaatacatcaatttaaaagacagactattagagtggataagaaaacaagactcaattatatgtagtctacaaaaaactcactgtaaatataaaggatagattgaaaataaaggatggagaaaaatatgccaagttaacactaataataataataaggctgaagtagctatattaatttcagacaaatcacatcttagagcaaggaaaaaggggccaattctccaagaagtcataacaatcctgagtttttgtatacttaacaacagcggtcaaaatatgtggaggcaaaaaccgatagaactgcaagggaaaatatacaagtccactattatagttggagacttcaatacccatttatcagtaactgacagatccagcagaaggaaaaccagtaagcatatagttgaattgaatagcacaatcaatcagttggtgctaattgatattcacaggatatttcatccaacaacagtagaatacacatttttctcaagctcacatggaacattcttaaagrtgggtcatatcctagttccaaaacacaacttaataaacttaaaagaatagaaatcaaacaaagtatgtgctcagaaaacaatggaaataaattagaagtcaataacagaaagatagctagaaaattccagaatatgtggagattaaataacatacttctaaatgacatataggcccaagaagtcttacgagaaatttaaaaaatatgttgaactaaataaaaatgaaaacaagtaactaagaaacgcttcctaacccattctatgagaacaacattaccctaataccaaaactagagaaatacaagataagaaaagtacagattaatatctctactgaacaaaaatccaaaaatcctcaacaaaatattagaaaaccaaacccaacaatgtgtaagaatagttatgtgcaatgaagagtgggatttattctagatatgcatggctagttcagcattcaaaaatcatttaatgtaatccatcacatataacaggctaaagaaaaaaacttttggtcatatgagtaaatacagaaaaagcatttgacaaattcaacactcattctggataaaaactctccaaactcaactgtatatagaacatctacaaaaaatctacagctaacgttataattaatggtgagagactagatactttcccctcaaatcctgaacaagacggggatgtctactsttactactcctagtcatcattgtcctggaattcctagctaatgaaataagagaagaaaataaaatgaaaggtatacagactggtaaggaagaaatgaaactgtttttgttcacagattacatgattggctaggtaaaaaatcttgaaggagttgaacctttggrgcagggttacctggcttttgattttaaaagaacaaacaagagaaaaacagaatttgagaaggaagaaagccaattaagagacagaagtttatgctgagagggactttccccaggctaaaatgattcttttagtcyggacagagaaaggtcagtgagtcccttcagagcagggacctactctagtttctggtactctctgagtaagtatcagggcttcagaaggaaggtctgcatggagcacttggaaggttgggttccaggcccagctgcttgttcttggtcaaagattcctatcctctgggcccrcaatgtggccacagagtggtggatctagaatggtcatgtggactacagacagatgccggtggcggagtgggtgccatatcttgatcctgtatttggtcaccaggtaggaaggacccaaaatgtctgagataaatttcctgtcagtccaatggagctggggtttagagtcatattttatttacaaaaaataaagggatgtggtatttcttgtagaatacattgtttctaagaaaataaaacttaaagcaaaaatcagctatttccakggttgtgaatgcaattctgcccatagataaggatgatttgtgctagtaccttattttatcttctcatttcaggtttctatggttattttactcctctcttctctgttcccattgcctaagtttatttttatttttattttttacgagatttttaatgaagtagcagcactcaacttttttaacctttgctgccaccctgtggctatcttttattactgtatatgaaaggggcatcttggagcttctgctaagccatccaaacaggaacaagtaagtgtaggggaagcatataaaaaacgtatttgaaaataatactgctcggtatctggggcatgaatctgatatatgctatacgtgtcttatgtatcagtatatgtctttcagaatgctattagtctgtgtctaaccttatcayagtactcccccattcctcacttcaaatcaagatgcataactacgctgggaacacagtaattgttgatcctgacttgccacctagtgtcaattattgattttaataaacttcagaaaaaaaatcttcgtaggaagctgaacctgaaatctacagtagacttaattattaaaatagagctctttgtagactttcagttggtctaaaacgtgtcrcattggtgcaaagcattttggctctccctaagcggtaagaaatacagttttaagaagtggaatatccttatagcccatttttcaggaaaattttccatgagaaataaggatgactgtaataatctccttgccacctgtctctctcacactagctctgccacttgttatcatcctaaacaaaatctgatcttgccgctgtgttgtctctaaaagatttcattagcttcctattaatggcagtggctgcttgctatcatgccccatgcagccagtgggagcttcgcctcttctgagttggggtgggggctccccmaggtgctgctgcagccctgcaaacctcagtcctccaaacctcagctgcagacccaggcttcctgctctatgaagcaggcaggagccccgtcctcctgggtggggctacagccgcccaaatgcgcttgtggatatgagcctccctgtgctcccggagggggccgggagtaggcaggatctgctcttttgggtgcagctgcagctgcccaatcctcagctgcagacctgggcctcgcgctccacggagcaggcaggagccagggacacgtgggaacctcccccctttcaagttgccgaggtgggagctcccctggcgcaggacctgggcatctctgcagtgtgcaccctcatgggcccaggaaggtccctcccacactcctgttcgcaagctcaggggtgtctgcttccactgcctggcctctctctgctcctggcactggcttggatcttggaatgaggacttgggagccatgaatggtggcaggaggcagagtcctgggaggaagggggcgggcccccagtaaggccccaccttcagatcaggaagggcctgaaggctgggggccaggctgccagtcccaccaactggagtggggacttgtagtgcctcttcctgcccacccatggtgcccatggaccaatcggcacacacttcctcccctccgaggtccataaaagccctgggctcagccagaacaagataggatggagagaacggagagaggactcaatgggaagaccagctgcagaaaggaaccaccctctctgctcagagcttcagagacttccagagacgggattaccagctgcagagaggagtaactctttccaagaggccagctgcagagaggagcagccccctccagggcttcctctctgctgacagcagatgtcaggatgacctgtctacagagatgacacaatgggaagaccagctgcagagaggaactaccctctctgctgagagattcagagacctgcagaggcgagcaaccctttccaggaggccagctgcggagaggagcaatcctctccacgcttcctgtctgttgatggcagacgtcaggacaacctgtctacagagagctagccactgcaggtctcctctgagctgttctaacgcttagtatagctcatctttgtcttgttcacccttcacttgtctgcatacgggaaaatcaacacccccaaaaatcccctaagaccattacttataaaatmacatgaaaacttctgttaacacgcttgataaatgagtctcaactgatttctctagcctcactttttatcactgccatcaacactgtcctgacttttcaacattaaaccatgtctaactcttttagcataggccccaattgagaactgctctgttttctgtcctaagccttacttagatcttttcattgcaattmgacaaaaatatcagagtattaagagtcagagaccaatcaacaggatgttctctgttccttcgtttcccaccaaatacagcactatgcacgaaggtggcattctctattgtgtccatttgttggggagccctgcaaatctgggccccagctgatgcagctctcttgtgattgagatttacaacaggaatctcatgtgccttatataagagcgtctgcaggcatggctggatccaattctgaggatggagattctctgacccttttattaaatacaggatagtggattattcataatcttggactccattgtattatccaattataagtctattggctctttcgaggacactgagaggctcttttctttctctactctgggaagaaagaaggtagggccacataatctttaaataaagagactctaagcmagaagttttgtaggtgttaccttttctcctccctcagcatagtctgactttgggaagggcaaattcaaatcgtgagcagcactggtcacagtctaccagtgccacatgcctcacacaagaarcggacaatcacgccatgctgatgccaacaggtctcagacatgaactcacccaagggtctcacagatgcctttcctgttttctttgccccatttttcttttttctgctttgcttttacatactttctcttcttttgaacacatcygtccttctgcattcagcctcccaccatcatctgatatctcaaaagaagagacagccgtctccttcctcacagctgagtagcactgagaagtagttaagggtatggactctggagctggaatgcttaggttaaaatcttgcctcatttttcacttggagcttgggaaagtttctgaacttctccaaacttctgtttttcatttaaaaatgggattaataatagtatctacatcataatgtgattgtgaggataaaattacctaataccagaaaaatgcttaaagcagtgccaggcagatggtagatactcagtattgccttttaaaaaattaacccttctatctcttttgtgcttctacattttttwaatctccttagaaaacttgttcctgtacagcaggtcctccaataagattgttcctgttcaacctcgttttgttataatgttgatgagacaatggccagggccacctgtctgtgtggagtttgcgtattctccccatgtctgtgtgggtttcctctgggcacttcgggttccttgcaaatcccagagatatgcacattaggttcgttggcacatctaaatggtcctagtctgagtgtgagtgtgggtgtgagtgtgcctgcgacggggtgtcctgtgcagggttgttcccaccttggccctgagctaccaggaaaggctgtgaccacctgtgaccctgaactagaatacacagcttggaaaaagaaacaaagaatgaatacataatttcacaataatttgtgaaattaatggctaagaatgggatccatcagatgtctaccctgtgaagtagatgataatcatacagatacatggcaataaatgatgcatgatgaaaatgctcgcgaccccaccacatttgttctcatttgttgttgaactgcatgctggtaggaggtgctacttcctaccaaaactttggtttgtaaacatttcttccttgatttaacccatcaccactacggaaaccatccctataaactttataaaattaatcagggaagaagggagggggagaaatgaaaataaacccagcttgcagcacactcagcattaagcactaggtcagcctgtgctcggacctgcttcctcctagttgtttgctgcctgttgccctagaatcacacagaccctagatcgtagttccccttaactgctctacagataacaacttgaacattataaaatgcaaagttttccatttgagatatcctttcaggtgctgcatactaatgaaactactgacatcaactggtctgaaggaccccataggagctgactcaccaaagaatgcagtttccatgtcctgatgaattcattctccttaccccagccaatcaatggtcccaattctccagctcctcaccctccatgatccccttaaaagccccagcccagaactcttcagggaggtgaatttgagggtcccctcacatctcctcacttggtgctctgtgaacgttaaaccctttctctgctacaaaccctgctgtctcagtgtaactggtctgttattgtgcactggtcatacgaatctgttggtcatgtaacactatgaatgctgtcactcagtgattcaccataaattggggagtcgccttgtttttatttatttatcatgtttatttcaatgttcaatattagaaatgttttgggtcttcatttagaagtttggtgatgtttctgtgatcagatatatgctgtagaaacagctcattttatttttaaaatttaaatataatttttattaccaaggttatgtgcaaaattttaaaaaggcaaattttcctatgactctttatgaaaaataatagttcatggacttctttaatctttaatttttatggatacataatagttgcatgtatttatagggtacatgtatttttatacaagcatacaacgtgtaatgatcacttataattgggatattcatcacattaaacgtttattatttatttgtgttaggagctttcctaacacaattctactattctagttatttttaaatggagagtaaattactgtttactatagttgctctattttgctactgaacactagatcttattccttggttatattgattagcctagggtaaaattggttttgttctatgtcatgtcatttaaagttgcagtttctaagaacctatcaatggtgttaagagaggatctactatacaggttgagcatctctaatccaaaaatctgacatccaaagtgttccaaaatctgaaacttttcaagtgctgaagtgatgctaggaggaaatactcactggaacattctgggtttccagtttttggattagggatactcaactggtaagcatacttcaaatatttcaaatctaaaaaattcaaaattcaaaacacttctggtcccaagtattttggataagggatacgccacctgtacttatttatacttctccaataacacgtgattctgtcacacacataaaactgatatccagatgtttttcaacccaaagtcatacaaatggtcagtggcagattttggaccagaagttaagcatttctaattccatgaaattgtcgtaatattatgactcccacctaaacawaacttattaattaattgattgattgataaattttcacctttctgcaatacggagcttctatctagacaggccagtcattttacctggtgctaaaataaaccatttcttctgcttttgcaaaaaatgtttccactcagatatactctacactcttgtcactaatcttcagtttagaagttttttcttggagtgaaactttcccagattgccattacattgctttgcatattctgaggttctgcagtagtgaggctgttgtgaattgttcctaaatttatgctaggtgctcttacctcaatttggatgccattatttgtttattgcaaatacagggtacaatraaaagcagtaagtgcgcatggagtaaatttgcattaaatgaagaaggaatcaattatagagtctctagaaatacatatttatttgccaacctcattcagtatctgtattgcagggacaaaatatccttttaaaaagtcgtgggtctggggattccagccaagtcttgtttatagacacaagcctcaaacattttcttgctctgtgcctgtggagagaagaggaaagcgaacaggatgacttcgggcttgccaaggagtgaatttaattctaattggatatggacagcagcagggctttgctaaaggagaccaaactggttatggctgagaatggaatccatcagatatctaccctaatcacagggtaatttcatttacactcttctgataagaaaatcaggaaaccttccaggaagttagtgttcctctccaaagctgtatagttctgcgttaccttgcagtatgataaatctgatatcaactaataaaagatgtagatgattttgtatttaggagractgcttttgagagcaaaatgaaggcttgggatatgtagagcaaactgcctatcggctgcaggggacactgtattcagcaaatttgcttcatctgaaacacacaatgggagaaaagcttgagaatgggagcttcaacgggacagggctatgtggagaggctttgacctatttaaggactgcaaaccatactgaatcagggcctgcgtgatcacaaaaatgtcagctcactggggaaatatatagacatggtcaaggaatttccactcttgataccattagtataatccgttactctggtggaaaatcaaagcctgctcatgctacagtgttcaagcaaagtactaggggggatcacgcgggtatgtgttctttcagttcttgttccatatttgcttcttttttcttgcatgatatttcttatatgttttcctcatctgaaagacttagcatamttctctccataaatcagtataatacccacgatttatattccagctgaaattttacttggggggtgtgtgtgtgtgtgtgtgtgtgtattttagggatggggtctcactctttcactcactgcagcctcaaactcctgggttccaatgatcgtcctgcctcagcctcctgagtagctgggactactacaggtgtgtaccagcatgctggctgattttatttttcaattttttgtagagatgggctctcacttagttgcccaggctggtctcaaacttctagctttaagagatcattctgccatggcctcccaaactgctgggattataggcataagccactgtgcccagcctcttcatttgctgtttaaagaccactcaacgctatagttctcacccctctcttagttcctactataattatttgtatagttcttaggctcttctttatttctttgcattgctatattatctttttaagatttatgtatgcctttatttataagcacttctacgtaaaactcttggtactttggattattttgcacgactgataggcttacatatcaatatacatgtatattacaggtagttttggcagtagttttgtaggccaaggaagaaaaaataagttatggagacagattaaactgaaaacaagatgtacaagggtttaccacacttttattsctttaagaattgaggtttggcctccacttccacccwtgttgctactatctcaagtgaaataactcagaaacaggaggtcaaatacttcacattctcacttataagtgggagctaaataatttgtacacatggacatagagagtgggataacagatactggagactcagaagggtgggagggtgacagggcaagagggatgggaaatcacttaatgggtacaatgtactctaattgggtgatggctacactcaaagcccagacttcaccactgtgcaatgtagccatgtaacaaaaccatacttgtaccccctaaatctatataaagtaaaaaagaaaaaaaccccaaacacattggcttttattttatttttccatcaaagacaccacactggaaagaactgagtttatctagkattctgttttgctcacctgtcttatagtaatcataggctttcacaaaagcaggtttcagctttcttatggggttgtcttgcagaagagtgaaagaaaaggtcagtgttcaatccgtaacccaagaaaggaaggagtaataatgcggaaccagggaggcctcatctctttttccttagcatcagtcttcatcctttgaaagataattttttagtgggctaataggattcattctctaattcattgtgctccctaatggctcacatagggagcagttggagggtgatgtggattttagagtaggaacctcaggaacttgagcagaggctcccaaaagtagattagaagtttattagtcttttaaacgattaaaataatacatattcctccataatatccaacacatggctctgcctatagtgagagatagattctttatactggcaagctgactctatctatattaatattaatatttccaaatattcaggaaacaggcgtacatcaggggctgttcttttgctgcaaatgaagttgatggaattacactgtgatacractgactgtgagtaatagatctagactgatagcatatctgtttatcatctgtatctaatctgtcatctaccttatttatctattatctatctagctatctctctatgtataatttatctaacttctctcatacatgtatgctaaggtaaggttgatttaatcactgacaacccttggaaacacttcctatccttgattaccaactttcaacatggcttctggatgatgaagcttatttatggaaaagaatgtttatctgaagtatacagaaatattcatatgctcattttaatataaacaaacatatatgttttaatataaacatataaatattcatatgctcattgtaatataaacaaacatatatgttttaatataaacatataaatattcatatgctcattttaatataaacaaatccatacctactggcctcccccaaccctcttgtctgtgacactccaaatcccaggaagcttgcgatgaggaatgaggatgtaaaatatctcacgtgaacagagaggatgtgcttttccaaatggccttcctaatgactgctcttctcgtaccacgtgcttgcctggtgatgagatcccctagaaggactgttcacctgggtctgtctagcaaggctggcaggggccccacctggtccacagaaatcaagatatggttgttgtgcacttctgtcctgctcacgtggctagatctttcaagctaaggaaaataagagaaatcaccagtgttactgaataaagaaagcctgtggggtacaaagagacaaatagactatgagattgaagaagtctatacataaacaaagctggggttaaattcatttaaatgagttcgaagacacttgtccagtaagatgaaaacatatacagagtattatgaataccaccacattagatacaagattgaatattcatatgattaagtaacaggcgtctttagcatttgtttgaaggtgagggagaagtgtcctcacattggatagctagtcatctgagatgatttgcaaagccatctgtctctacactgccattcatctcagctttctctacatttcacagtacttaaagactatgccaatgattttggtacttaattatatcttgccctgaaatgtcatttgacagttttggttacccatgtgtaatatttttatctagaatgtatcagcacctagcacaatgctaaatatatatttggtactatatgaattcaatttccttagattatgaccaatgttgctttgacattattaggataccattgttttattcttacattggattaaaaaaatccaaacacctagcacctatttaccattttcactgtgggtttcaatggataaaaccagatatcaacttggatacatccaagaytagacagctccctgtgtaactatagatataagaaagaaaaataagcctcagtgtcttttgaatcttgctctcagttaaggttcaacataagccctgacatctttatttatttttgtttttatgtttaattttatatatgcatgtatgtatgttgagacaggttcttgctctgtcaccgaggctggagtgtggtgacatgatcactgatcactgcagcttcccaggctccagctatcctcccacctcagcctcctgagtagctgggaccacaggtgcatgccactatgcccggctaatttttgtgtttttggtagagatgaggttttgccatgtttcctgggctggtcttgaacccctgaactcaagcaatccatccgccttggcctcccaaaccaaagtgttggggttacaggtgtgagccactgtgcccagccagccctggcatctttttttttttttttttttttttttttgagatggagtttcgctctgtcgcccaggctggagtgcagtggcgtgatctcggctcactgcaagctccgcctcctgggttcaagccattctgctgcctcagcctcccgagtagttgggactacaggtgccygccaccacatccggctaattttttgtattttgtttgtttgtttgtttgtttgtagagacggggcttcattgtgttagccaggatggtctcgatctcctgacctcatgatctgcccaccttggcctcccaaagtgctgggattacaggcgtgagccatcgcacccggccccagccctggcatctttaagtagctttgctaaccattcctgtgtccttagtggtctttcaactgctgggaataaatagcctttactgtcagtgtgaatggttctgaaaactaactgcatgatagaaccacctacagagttcattaaaaacatagatgcctgttagcccaacgtggtggtgggcgcctatagttccagctcctagggaggctgaggcagaagaattgcttgaacctgggagcagaggttgcagtgagctgagattgcgccattgcactccagcctgggcaacagagtgagactccatctcaaaaaacaaaaaaacgaaaacaaaaaacaaaaaacgcagatgtctgagcacatccccaaaaataattaattaaatctttattgatgagacctggatatctgcattttaaaataaattctacaaaggatgctaaccagattttagaattgctggtatatgtcgcttctttataacttatatgttttggattaatgatgatctttttcgtcacgtgaagactatcttcacaattagactataagatttctctaggtaagagacagtatatttatatttcctgtggttactcgaatatgattttgcttaattaatatgtcttgcttttgtgaaacacatttaacttgtctactgatgatggatcaaattgtgaatattatttccttttttcatccgagaagctaggattaaattcctttaaatgaatttgaagaattttgtatttataaccagagtcatgggttgtattccaagtaaagctttttttattttttatttttttatgagataggatctcactatgttgcccacactggttttgaattcctgggcttcatatgatcctcccatctcaatctcctgagtagctgccagataaagtttttgaaaagtgttgttgaattgggaatcttttttctcttagaaaaatagaattaatttttttttaatagagatggggccttgctatgttttccagatgtttgccaggttggtcttgcactcctggcctcaagcaatcttcctaccttggcctcccaaagtgctaggattacaggtgtcagccaccgcacctggccattgtgcctggccaaaaaatataattttaaaaagaccagaaagacttttctttagaggtaaagatgaatgagcctatgttaaagtgtcattgaaagaaattattaatggtcagtcgtggtgactcacccctgtaattccagcactttgagaggcttaagtagaaggatctcttgagcccaggagtttgagaccagcctgggcagcatagcgagaccctatctctacaaaaaataaataaataagatgaaaaagaagttatttattcttcgatcatgatggcaggcaatcaaagaatcttggaggcatactagttagagcttttaaccccacaggtcttcattgtccacatcggtgatgaccatttttttagtagacaaggcaagaacttaatgaagagaattactttacgtttcttgaatttactactgaagagttataggtagctaatagctaatattttcgtagctagtgttgggacacggaaaccaaccccccaaaatatggtgctttgatgggctgaactgtatagtatatctgatatatttatatagtgtataaaaaatcacctgacacaatagatggataatatatctgatatatttatatatcgtataagaaatcacctgacacaatagatatgtaatatatctgatatatttatatattgtataaaaaatcacctgacacaatagatggataatatatctgatatatttatatattgtataaaaaatcacctgacacaatagatggataatgtatctgatatatttatatattgtataaaaaatcacctgacacaatagatggataatatatctgatatatttatatattgtataaagaatcacctgacacaatagatggataatatatctgatatgtttatatcagatatattatacatttatatattatacatatacatttatatatatacataataaatacattgtattatacatatatgtatatattatacatatacatttatatgtataatatagttgacatatttatatatttatatcggatatattgtacatttataatatatttattatattttatattatagtatattatcatttataatatattgttatatgttatatgatatatatttatagcagacatagtaaatatctattgtgttaggtgattttttatacaatatataaatatatcagatatattatacatttaaacagttaaacacctaaacagcccaattttatgtggatcagtactactaacggcttagggtaaaatgacagctacagcrtaactagaatgttaaagtggcatgtctcagacaacgtggatggacataaagtatttgagagaatattgcataatagaaaaaaacattgtaaagactaaaatactaaataagacctttttttcccgagcaataatttgcccaggctggtctcaaactcttggcctcaaatgatcctcctgccttggcctcctaaagcattgggattataggcatgaaccactgctcctggccagaattcttgattaaacaatagggtctaaataaatttaaaccccttttattctttttattcttacagggtagactcaaatattctatttctttccaactttatattcttgtcataacaacccagtattctctgaggcaaatggatgcttatgaccaactggcctgaaatgggggaatatagggttagtggtgagtcacatataagaaaatgcaagagaatagcagtgtatcatatttcaaaataaaatacaaactatacataaaactgaccccaacaagtatccatttcatttcctgtcgtgtatctatatgctttcctggaaagaataaacttcagttcacaaaatcagatgtagaagatacatcacttttaaaaattctacgtaattttaattccaagattcccatgccaccaggctggtgggaaatccagttttagttgtaattaggccttttctccagtattacatatgaatttgagtgtaataccccaaaacttgagaaggccattgtatctccagtccactggggcaatgaatagcttgagcacctgatcattataatgacccagatgtgtatctttttcttttactctgcggtgagtttttctaagggaggaatcctattttgtttaattttgtattatagcatgggatattgtgcctggcagatagtaggcaatcagttagtatttcaggaataaacactcttggtcagtgatacagctaatgatttgcaacaagcatatccttaaagtaccttttcagtaacgatttccatatgaacaaagaaaaaaactagaaccaagaggtaaaattataatcctgttgtcttgttcccatagccatactctgatttcttttatgttctgtgccctggcttgatacttaatttgacagctaattataatgtttattaagctctgaaatatactttctcctggcctttttgtctgaagttgtttgaggtgtcaccatggttggaagttaagagcatggaagctagacttcttggtcttgaattctagctttgtcactaacttagtaactttgggcaaattacatgtctctgcttcaatttcatttgttaaggtagtacctatttcacaaggctgatggtggcagcagtggggcgtccagagctgccgctgccatcacgccagctgcagcagggaggggcgggcagcggcggcggagcagctgcgggagccgcagtggctgctgtgggacatctgtgcctcgcgtcccctgtgccttgagaccccaaagcagccgactgcgccgccaccatcctcgcgttgccgggtggggcgacgtgctccccggccaggagcctccaccgctccggaccctggccctatgtcgccgctctcgcccgccgccgccgcggagtgggagtggggaggaggggaacagtccttggagccggccccgggagtactcccggagcctgccgccctggaagccgccacgatggaccgggctgagtcgcccgccggaggggaagcagtgtagtcgggcacggaggggcaggcagagaggggccccaaggcggagctgggtccggggcggagcggtgttcgcacacaaagcgctggggctggacccagggttcggggccaaggcgagaagtgggagcggggcccgctttggggacccggacagcggtgtggccaccgcgcacacctccgacagcgccgcattcctgggccttgggaggaggctctgagtagggccgcctggggcgcgtcttcagggtcctcccggcactggggtgaccgccgagctagacgcgcctgagggctgagccccagggctcgtgatctgctcccggaggcgccccccaggcagggccgtgagccgggcgagggagagtcctgggctgcccctgagccccggggccacgggaagaacttgcagcgacgtcatccctgccccggacacagtcccgggcccagggaggacctggaacattcccttcctcccccscccccccgcccccgcccatcagcccagcctgcaaggaggcgccaccggacctgcacactcaggagcaggtgagccagggacaagcaggagccccgccccttccgaactggtggagcaggagctcccagggtgcagctgcagccaccttgccgcggctgtggacattttctgtgctctcagaggcccagcaaagtcccctgcccactgcaggctccagggtgcctactccggctgcctggcttctctccactgttagcacccactctgaactcagagcaaggtcgggccgagcctgggtactgtcacagcctggccgagcgtgcacacgctcaggacagtgctgatacgccagccccctgccgtctcggccccctttggaacttgggcaccaacaagcgtgggagggaggctgagaggggtctgaagacagctggacactgacttkcaggcgctccttggcatgaacagcctgggagcaggaggcagacaggttcctgggtggaaggggatgggtccccagtgaagtcccaccctgaagctggtgagggcttgaagcctgcagaccagagaggtaacttgtggtgctgctccctgggcccactcatggctgcccatggaccaatcagcatgcatttcctccctctgaggctcataaaatcccccagactcagctagattggaagagaggatgggaagacaatggatgacctacctgtggagagaaactacccattccagaacctcctctctgctgaaagctgaacactcaatgggaagacctgtttgcagagaggagccagccactccagggtctcckttctgctagaagctgaacactcgttgggacacmcttgctgtggaaaggacatccttactgtggaaatgagctactaactgcaggtctccttcctcttcatcttccttatccttctgttccattgctcagtaatgctcctcttcatctgtctcattctccacttgtctgcttgatgcaggagctgaggagctgcacagcaaggttaaaagagctgtaacacaaacagggctgcaacatgccccttgctccccacagggagagaagagctctggccctcggagaagcccagacctgggagctccttgagcccgggctgtgactccctctttggggccctggttggcgtcactgcattcgccagtgccactgttggaagctgcttgtgatgcgcctggtccagggggaagctgtttgttgtgtgcctggtccagccacctcatggagagcctgtgctggcacctggagctgcccaacctgggcagcagcttgtgtgtgtgactgcacagtggccacgcttgctcacacacccctagcacacccctctgctccacccgtctcaatctcccttggatccgggatccaggttggtagcaagtgcgagtgggcagaagcagcccagtgggcccagagcaaaactcaggcaaaggtgccactagactggccaggaaagcgacaccctaaagatcccataatgctgatatgttaattctattctataagcaccacacagaagtgatagcttttatttcttattttgtctagcctggagacagagctaaggattccttgaactgcaaagtcttttccagttcttagtttatacaatccatactcaccttctgcctaactaagcattgtcatttttgtgccaaatgaagagtaggactcctacgattgtcctcagactctcttggctcaatcctcctgctttaacctttcctacttcaaaaactcctgaagttttgcttccccttctatagaatggaaatatatgtcgcaatacttactgcaaagaaaattatatattttaaaaatagactaaagagatgttgtgagacatcagacatcaatcagatgttgtgagaactgatttctgcatcagaatatctccttgactttacagctatcctttaatcctggctcaaagttccagaagaaagatgatccaatataatactcctatttggactttgagtcatacacattccttcttctgagaaaacgtgcttctgcatgaatcctcccttcattattttcagctcatctattattgaatctgaaaccccaggttaactgactgatcactctcatcagtggcagattttgktgtaacataggacacatcactcccaattcaggtcaagtcccaattatcttgcctctcaatatgacmtgttcaatgttgtatttcattctacttcattttaatgtaaaaagtcttttctggtgaagtcagtcttttattttctcataaaaattcaccctttgggtttttcatagggtattcccataaccaaacacactttacactttcctagtacataacccaatactttcttctttccccacagtccttacatgaagcctactcagaccgacatcactgtatcatttttttgtattctgaagtccttcagcacttgattcctttaagtttaatcttggtattctattgggaatcatatggaaatgtacaatgatatttattgaatgaacaggaaacagggaaagacattgaccagaaaaagtgtttattcatcaagtctttaaagatacaaaaacacgtgtcttctgkggagctcwgaraacaggactccagcaaagcacttttcagccttgtggtcttcaagcatttccaagatctgtgacattggaaagaaaaaaaattaagacagatttgggtctccatgagcagagagtattctttsccttagttctgggtagcatagtgcccaaggaaacctaatcagtacagwgggaaaccaaatctattccaaatcattacccataagcaatcctatggactctctgaggtttgacagagtcagcggccctctccaataaatgtgtttttctataataatgtgcagtgtgagtaatttgatgtttttgacaaatatttacccagcgttttatgaaggagaaggtttgggggacaagctgaaggagctctgactgccttttggaggagtgtgagtggcttacctttgctgcaaggagcattgtactcagcaattgcaaactcatctgaaaaaaaaaaaaccaacaaaaaaccagaaatcattacatgaagtgagaaagaaagcaaacatctgtgggatacaggccaaggaaggagtttgttgtgggaagaacagtattgtaccagaaacataagcatcattcatctgatgtgttgcttgctaccttatattctcctttcaaatatagtgttttatatattcttttatcccaaactcctgaaggactcttcagatgttctacttacttaaatctcatattgtcatacagtccatttatctgatgaaaagggaactaaatatcccacaggtgttttgtattagtagttgataaatttataatgtaggttgtttctataatgtatgtataagagacaaaaagaggrgcatcagacttgatggagacaaaatgaagtgataatgtaattacttaatgtaataaataaccccaacacatctcctaaacctgaatttctgtgatcaggaattaaatatttctacgtgaaaatcactctcactcacccgtctcgtagtaatcatagactttcactatggctggtttcagatctcttactgggacatcttgcagaaccgtgargaacaagctcagtgtctgatttgacacctggaaagcaaaagtcaattaaatgacctttcaggaagctttcttctctctttgaattagtttaagtattcacctgttttttgggggaaaagctttattatcctacagcacactatagggtccttaattaaattgtgcagaaatctctcagaggggatgataaattctccagattatttcttaaataactaacataaygcatatacctctgtcaatgccaatacatagctctgttcatgggggtaaatgatatatactttttattggaygactaactgtgttcattttttaatatccagagatttggtatagtttgacttctctgtcttgcaggaatacttgcgtagactcaaagaggdtctaaaaggttgatcttcccaggcttaagtttcataaaatttgtaaactataattcccatcaacttatgcatgaacaaactctcctaccacacatatctataaaatcagattggtttactggtgaactggtcttattattttatggttcaagtccttgtggagactgacagttttttttccctttcatattgttgttgagtatgttgataattaactaataattgactaatcacaagggctacttccttrtattactgggtatccaaaaaacttgtcaacataataaacacattttgtsaagatytcttgcttatgggattttaggaatattcatatcccaagatcataataagccatttctacctgtaatccctggtgaaatataaataaaggagagaagaacattcttttagagttaacattagaattctcaaatttctagcatggaagtgatgtttctaaaatgcatttaccttcccagatgttyccttagaggattattatctacgtttttttgcaaatagactggaagttctcttaccttatcaaggtaaatcaagacatggttgctgctgacttctgtccggctcacatggttagatctttcaagctgaagaaaattgaaataccacaaatgttaataaatagatgaaacccctgggggatccagagaaaaaatctttgtattgccaaaataaccctgagggtagaattcttcaaatgctttttgtaaggaaatatataatgtaatacaattaaaaatgaaaggcataaagggtttactattagtataacacacgactaatgtgtaaagttatttatctgaagaaaagacagctaagtatcctaaacttggtagttactcatatttcaaagttcaattcagtttctatttcttcataaggagtttttttcctgttttgcttgctctatttttcttttaacttctgtaatacttatagtttatgccaatcagtcattttcatatttttcactggttcgtgttcatatcttttatcttcttagcaaaattctaagctaagaagaaattgaaaagcaggaacctgctgacaatctttttcttgtagtcatgggtcctagcrcagtgctctgcacatggtcagcattcatacaaacacatgtgattrtatttctgagctggaaaaaggataaggctttgatagagattgactttaatagtattttgatattagtattgtcttatgctggggatacatacatcattaaataaaatagggcagtctggggttatgataaacctaccattttcactgttggcttcaggggaatgaagccagagaccatcttcacatcaacgatcgccatgttggaggcagagcggctccctgtgtaactgaggatccaggggaggaaaggattagggttttctgtgtttttaaatattttcttcttctatgtccatgttaagcattccacagctctaaaaggtacacgtaagtcttcccaaatatcttatcccagtggtttgtaaaagtggtgtgcgtagaatttttaggaagcctgttaaagccacagagaccaggccctactctagacctgatgaatcagaatgtctagtgtatgggggctgaggatctgcattttttttttttgatggagtttttcgctcttcttgcccaggctggagtgcaatggcatgatttcggctcaccgcaacctccgcctcctgggttcaagtgattctcctgcctcagcctcccgagtagctgggattacaggcatgcaccaccacktccgactaattttgtatttttagtacagacggggtttctccatgttggtcaggctggtctygaactcccgacctaaggtaatctgcccgccttggcctcccaaagtgctgagattacaggcrtgagccaccacgcccggctgaggatctgcattttaagaaagctctacaagtgatgcacaggctgtttgtgacctctaatctatgccagttattttatttatttgtttacttttattttctttcagctgacaaaatgatgtatattatgaataataaatttcagtctacattatttacaaaaacaacaataatttataatgtttacttaaacactggctttcaacaaaacacttagaaacacctagcgtcttgtcccyyagagtttgcatccgaaatttggactgcttaatttattttttggcatatatatacaccaaattaaatgaaaaaaawatatatatatatacttaacttttaggttcaggcgtacacatgcaggtttgttatataggtaaactcgtgtcatgggggtttggtgtacagattactttatcacttgggtactaaattttgcactgaattgttgtttttttctgatcttctccctcctcccatccttaaccctcaagtaggctctggtgtctgttgttctcctttttgtgtccatatgttctcatcatttagctcccacttacaaatgagaacatgcagtgtttggttttccattcctgtgctagtttgccaaggataatgacctccatctccatccatgttcctgcaaaggtcatgatctcattctttttgatgtgtgccagttatttgttacatgtattttgtcctaacttttttcctgaatagtatctccaaccaagtaataatatgtttgtggagagagagttttttatcagatctgcagctatttaaatattgatgcatataagtgtatcttccccccaaattaattatatcatatataacctgagatttattattgccagtaggaattctaactaaggagtcactacttccttctattcaaacttttcaataattcttcatctctatcttcaataaagcaagaataatataggatttcattacataacaaggaattcaggtcagaggcaatgggtaatatttacttagttgttattgagggaaattattaccctttaaacaatgaggttgcacaatagtagatcctggatggacaatgtaaaccccatcattgagaaattatatcaacttaagagaatacattgcattttttgtgaatagtgcaaatatctactgttgcactgctttacttaaagaggagttcccgaaagaagactggtggttattcttaggattaggtgatagagtcagaaggtcttacctgacacttagggagatttggaagctggtgtgggctttgggttcatcacaagtttgaggcagagtctgcactcctaaagcaaaggggaactcttccttttctgggagaatattgtatttcaaggatgtctatagaacatcaaagacaaaatcagttttttgccctttcccagaattcctgtccaygtccctaaccctttctctgatctgtcccattgttttctgagttaggacttctcagagagaacagctgctgtcctcatctgtcctgtcctcacctgcccaagagtctcacctggaggtagacacatccttctcctgtcacyttcatgctgtattccccaggcagctctggcaatgagacctgctgcagtaacaggcggttgttgttgtccacttggaatttgctggaaaatgtccctgaagactggatagtcacctgtgcagccttcccagtcctggtaaatgtggctgctccatatttggacagagcatggagagccaccactgtgtcctgttagagacagatgagtgagagaacccattgggcattataaggctttgagggctgagatatttttcaaagacccatgtgagggactttgatttcctacttccctcactacttaaatataggagctgtaatttcaagattgattataatctttagatagttgaagaaccataacattcacatatctaccttggactgtatgccctacatgtttattttatttatcagaaaattgatccttttctctctgtaagtatatgtgggacatggaatgtggaaaacatgtgaatggcaatcagttattggcatcagctatttgctaacatgtctttcttgacaactatgctcatatctgccaccactcaagcaaagttcagtctggctctctcccatattaaactttgctcagttgctgaggtcagtgtcctggagagaacccaaggttctttgcagcmatgagcagagtcatgcttcagtttctccaaaagaaataaaagatgagtattataattatcttctggatttaatgacatttttatttggctttccctttttattggatgatttcctgttcccagtgaatgtctgctggtatgtatcctcaacaacattaaacctgcttggcctccttcaaataatatgtttctaataaatgaatgataacctttaacaaaattacttagtttttttcattcatatgataaaagattaatacaatggaaataggatggaatgccattttgtcacattttttccrttttagggtatataagcaaacatccraattctctgaagataaaactttctgctgtgtacatatcaatgaattgttcagatacatggttatatagctagatttaggaggttggatgaataaagacagttctttatgctcctgatgaataaatgtttgtgtattaagaggtgaatagggggctggacgcagtggctcacacctataatcctagcactttgtgaggccaaggcggatggattgcctgagctcaggacttcgagatcagcctgggcaacatggcaaaacctcgtctctactaaaaatacaaaaattagccaggcatgattgcacatgactgtaatcctagatacttgggaggctgaggcactagaatcgcttgaacctgggagatggaggttgcagtgagccgagattgcaccactgcattccagcctaggtgacagagcaagactctgtcttaaaaaaaaaaaaaaaaaaaaggtgaataggggaagcacaaaatgtgtagttttgagaaaagcctattaaaggggacctaagaatggagagatttgcgaggagaggttgttggattttgagtagagttcctttgaacagtttgaaagagaccctagagctttcaggagaatggcaggagacatctccttcattctgctggtgctccactgctgcttgaggaaggcagtgttgttatgggaaataggagatggataataacacagcgatggggtgccggrattctgagcatttccttttggcyctctttgactttgatttgcttttatttccattatccttggatactgaaaacttttcctcatttcaagttactgwcatctgtatttttttcttcttggatgtgtytgtttctttttcattcaaatcttttgctacctgaaggtgaaataaaaggttttggcaaatcaccaacctgggtggaggagaaaccgccctgggcattctgctgcttcrtgatccacttcacgatgttggttgcagaggtcaggtcctccgaggttggggctggctgggccgtgagataagcgaggagcacataggatgtcatctccacctcagcagagggagcctggggttcgtaaaaatgccccactggtgccttgggtttctgagggcgctcccaatggacagagttgtcttaaagatgagaaaaagatatttataagtgcctacatatttatatttaattcaaggtgaaagtacccaagccagtgctgaaatgagaattgcatgcccattataatcccctgtactgtatgtagatgcttttcccttcatgtaaatctgaatttggtgtgttttagcccagctaaggcagatattgatgctggagtcagaagcctatgcctatctatgttttcaaatcgttgctatagtcgggttggtgggagaaagaaatggcacagcagttgtctcattgagtctggctatttcctatttatgatgttatattagactatagctggagtttgttacatttcctataaagtgtgtctttatcagtttcttgtgaggatcacagatcacatgaaatagtagagtttgtactcattaaattgaaaaaaaaaatacagtaatccttgaaataccaaaggctgacatggatgtgaaacaatgggaaccaawatacactgctgtgggaagccaactgctctttggcaatattcagcaatggggaagatgtgcttagcccactaatcagtcattatgcttctcaaagcataatttggagaaacacagatgcacaagaaaacaggcacatgagtattcattgcagcattktttttartagcaaaacataaaaaaaatccatgaggagaaactcgatgtgtaaattatgactaatttatagactgtaatatattatgcagcagtgaaaattaatgagctgactctgcacatactkgtataggggtcttcatcaacatagtgttgaacttagaaaataaaaagcagacaaacaaaaaactaagctgctgaaatattcaaaaatgtttctcttgtttcttgaayaagagagaaataaaaatcttgtttctctcaagatgaaacacaygtgaagattctaaatattagttagggatacatatgcagcaaaaatataaggaaatccatggaattgtaacracaaattcaggataatgattgcctctggaggtggtagtgatacacaagggatttatttttcccaygtcggtaattttctatttcttaatctatgagagagytgtacagtgttttctagttatagcttatgcccttttgtatatctattataaaatatttctcaatacattttaagaagaattaatggctgtcaaaggaaaaaggtagactgttttaatggacatcttgtgatttgcattttattttctatttcttcaacygytcatatagaccatggtatatgtagaagtactgtgtgaatatgagtagattggtcaacattattggtcttatgaaatgggcttaaaataccagaattcattcaaggagttacttccatgattattttcttatgtttaaggttatataatgtaccaggtaagggttgggcatatattgagaactgatatgttarttgtaataactagtacttttataggatttgctatgtgacatgtactctactaagtgttttacgtgtaccaattcatttattacaacagctctgtgaggtaaatactattattatccccattttactgatgaaggaactgaaacacaaggaagttaatgactttcccaagctcacataggtagcacattttggagctagtctccagagaatgctcttcttaccagcatactatagagatggtccctgacttacaatggtcccacttaagattttttagactttacaatgagtttgtcaggatataaccccatcgtaattgagaagcatctgcacrgcctcttgtcttytgatttctgatttgattaagaaatcctagattttataagatgcaatatggacaaaatatatatgatatatagaaaagaagagaggagacagggatcacaggaggtaggagtgagggatttttgccatgcagttcttgatacagaggatgggccaggagaaggatctcaggtgtgctctcacctttcttcacagcttcctcattaagtgacttgagtacttccttcctcytgtcctggttacctgccagggcaaaagcataggccagcagtgctttggtatatacatggctgccatggtccccttcttgtgctgtcttccaggctgactccaggcaaaacagggcattgcggacaacagggtgctgtgaaggcagaacaagaagggaactaagctatgtaaacaggcatattagcattcccaggcaaatacacggatcacagcacagaagtttttcaaaygcatttttccaacgattcctcattcttatcaatagatataatattatttttatctgttattctcacattcaaaagatacatctttaagattcttttttgagtggtggtggtaaatagcctaggggaattactgggaaaatttaaacctttcttaatgggctgaccaaattctctgtagatctgggaagcactggcattgcatagaaagaaagctgatgctttgcttttaataggatagtatttcagacagcaggtcagcagtttcattgcatccagaactctccttcagcagaggaatggggtggtacctacagtgactgtgagaggaatctccagaagggcgatggtgatataggcggagagggtcacttcatcttctactcctccctgtgaatacragagagagatytgaataattcaacttctgagaatgctattgattagttctttctattctgctgtgtcatggaattcatccttacccatatccatccctataggrcaaagtatcacaatcaacttttgttctatcccctcttttttggtgccatccaggttttattttcctctgaggctttcccttagaatttttcacattatcacttcctatcctcatccttgcagatatcataatggacaaatcaaaactagctccagaatgattcacctttatggcattgttgagcagtgacccagagctcctgaaacagccattgtccttctgcctctgggagagccatatgagggcttgggtaatgtgtgcttcatcgatgaagatgtaggctcgagcttgggcaaaagtcttcagaacaaaggctgtgagcctgaccagggaggaagcaatcatgatgtttatgttgtcaaaatggttttataaccacttcacagcaacaggcttcatatgatgtgagttagctaacaaaattcttgtgtacttagagakcttatctccttgattaatctttagtctgcctgattaatctgctagatgtagtatttccttgctaactctctctttgccacagggagtctwagtatatttaattttattttagttccgagatacatgtgcagaaygtgcaggtttgttacataagtatacrtgtgccatggtggtttcttgcacctattgacccatccgcttagttccctcccgtcaccccacacctcccaacaggccctggtgtgtgttgttcctgtccctgtgtccgtgtgttctcattgcttaactcccacttatgagtgagaaatgtggtgtttggttttctgttcctgtgttagtttgctgaggctgatggcttccagcttcatccatgtccctgcaaaggacatgatttcatttctttttattgctgcatagtattccatgatgtatatgtaccacattttctttatccagtctgtcattgatgagcatttgggttagttccatgactttgttattgtaaatagtgccgcrataaacatacatgtgcatgtgtcattatagtagaatgatttatattcctttgggtatatacccagtaatgggattactaggtcaaatggtatttctggttctagatccttgaagaatcgccatactgtcttccacaatggttgaacaaatttacattcaagtaatttgaatgtacttatttttgttagttacttgagtaaggctttaaatctctcttatctttagagatttccttctgcagatgacagaatcttctcacatgcagctcttacatgcagtaaattttaatattgctttactttagggatttaaaaaaatgttttatattactgtttccttctcaattgtttcctcttattaatgaattcattccaagtcaagctgaatgacttagaatgtgacaatataagctgaagttaacatggtttatctggaagttatatatgttcactggcaatatcattttaaaactcatggttatggtagctactttagaaagaatagccatttcagaaagaaaaccttggtacattattaataggatccattytggaaacaagcctaacataacatgtatttggatatcaggttttcttctgattaccttgctaatcttggtggatttatctagtataacaaaccatcggtctgataatacatatctgatagtgttgctgtgaatataattgaggtaatacatgtaaaagagctggcacacaaaaagaagctcaaaaaattgttctttccttaccaggtgttgccctggttcctgccatatcgctccccaaaggtgctgtaggagccatcatagtgtttgtagttcaactgtctctggtaacctggaaaggaagattaacgaaacagcacaatggattaatgtgcatgctgagggtggagaaattactaaaagtaccttggcttctcttgtgacatttcttaaattttgttgtcatagattaggagtttctgagccttaaatattttattggaggttggagagtggatagtttccttgaaattaactatcatagcagctatcatagtgagctaagctaatgtatcataatattcataagtaactgaaacctactgggaaatccagttgaaataacattcaagttttcccttactcaagtaatcactcaccagtgttgagatagccaatggccttggacttgayctctggagtaagctgctgtgtttcatttagataatccagtacatagatgttaggagcaaagaggaccatattctgctctccayagccatagggcatctggagaagattttgtgtgttttgcatggcagagcctaatatgtctcctagagaatgggagagatgggaagtcataaagcttggagattatcatctatcaaagtcattaagcagaaataattagttgagcttagaaattgagaatttttaggaaggatgattcttccagggatagaagtatgattgaaagcaataaacaagcccaaagaagaagagaagaaagaagttaaaattatagtattatttttagtaaatatttatgggaaataaaaatagtataatagaagctgttaatgcccggatccactaggggctggagactcacccaaaactgagacagaagctcgggcagattcttctaccacatttggtggcagtttcagggataattcttcagaaacctcaccacctagagaaataagcaaatcagacatatgaaaattatttctgcattatatstttctaaacagctctatgacccagaagctaggactatgccttatacctaaactcctcctgaaaagttgtccgcctttaatacaacagtaatatataaatatcttaaaaatgggctactggtttcctgtgattttcagaatttcttcttcaatgatcttttcagtaatttatgtagaatcgcatgccaaataagacaacaaattgtaagagcctggtgatgttgtgattcagttgctgtcwwctgatggctgacacaagacggttatcacaagatgatctatttagttcccaccaccaacttccttactcaacagttgtatggagaaaacaccaacaacaaagccctataagtatacataagtaaaattacccacaaaaggtcctgaattctataataatgctatgttctttcttcaaatttcatatacaaagatagtatttttatggaaaacctagaaaattgagggtaaggaagtgaagacgaacagtatttgatgcattgaaaataaaataattactactcatgaacatacatttacttccattttaatcttggtaaattatatgaaatgaaaatgagagaagtatrgtatttattttcatactgaatcccttcctcataaaattcatattaaaatgtttcttaaaaaaaagccataagcatagttaaaggacaaatggctaagcaaaataaaatgcttgactcactgaaaataaaataactgctaytgatgaacatacatttactacaattttagtattggtgaattatatacaaatgaaaaatgtagcagttatcttccctttctcataaaattaatgttaaaacttttgtaaaaaaacagatgccataaacaaagttaaaaaaatgaccaagtgaaagaaaatatctgcaacatattcaacagataaagaattagtgtcatacaactgagtcagaaaaaaactactcaaaagacaaatagccaaagattataaaggcaattaataaacatgcaaaaataaggtcatccttgtaattaagaaaatataaattaaaacaacagcaaaatttttttttctaaatttttggcaaaaattaaaattaaaaactttgatggtaacagatgatggcaaatataacactatggaaatgtatcctggtggaagtataaatgcatttaggtaataaagaggaggattttcgttttgtagttcaattaaaattcagaataaagcaagatgatggactagaaagtctcaggatcttcctccctccacagaaagtccaactagctgctatccacagatcagaaaatctattttgaaaaccccaatacttggaaacaagtctaggacacctacattgttcatagaactgagtgaagacaaattagaagagtaggaagaatggtctcactttgaccatgtcattgttcccactcctttaggttagcacaatgccagatagagaggagttccctggggtcacagtttctacagcggggaagagaaccaggggtagacatcaagattctcaagtattcaaagacacttctcaggaagcccactctggtctcatttcaccgggaacacaggaagtaatgaggtcaggtagaaacaaagaaggacagagctcacagtgaccagcatgtggattttggtagtgcttctgtgtttctgccagctatggcacccattcagagataccagccaactgcatagcccatctgcaaaactgagctggtcactttcagaagcatgttgggaagttcaacctagcttgagtttccagatggccagtctgtaagcccagcttcagaggttatgccagtgaccccacccaggtagcagacaccacctctgtgtatttcatagaagtgtaggggttaaatatgcttgacctgggagtctaaagggtagctcaactcagccaaaacctcactccatggctccattcacaagggtggggtagcaatcctctattatgcacatctaagaagtatagtatttatttctgcccatcccaagcaacaactctacctaacctcacagcccggattgtgaccctgcctaacttcaggtcccaaatagcagaatcatccagccaggcaacacatcttgtgactggcctgaccagaggccattgtagtacccagccagcagctccaccagatagcagagacaaaacagtgatcttgccagagagcaaggcccaaccagtggccctaccaaacataagrgcaaaggcagtggcccagccaactagggaacccatgaaaactctgcctgctcaaggttgtcaccaactgatctttccagaattataggctagactaaatagcaaacctttatccctgccaaagaatacctataaaaaccagaagaagtggctttctcctcaaatgcacaaacaatgcaaggacacaggattatgaagaatcaaggaatgatgacacctccaaaagaaactggccaagctcaaaaaattgacctcatagaaataaagatctatgaaatcactgacaaagaattcagaataatcctcttgaagaaattcagtggactacaagaatatataaatacaaaattaaatgaaatttgcaaaacaatacaccaacaaactgagaagtttgacatagaaacgattgtgaatagtgccacaataaacatatgtgtgcatgtgtctttatagcagcatgatttataatcctttgggtatatacccagtaatgggatggctgggtcaaatgtatttctagttctagatccctgaggaatcgccacattgacttccacagtggttgaactagtttatagtcccaccaacagtgtaaaagtgttcctatttctccacatcctctccagcacctgttgtttcctgggacatggatgaagctggaaaccatcattctcagcaaactattgcaaggacagaaaaacaaacaccgcatgttctcactcataggtgggaattgaacaatgagaacacttggacacaggaaggggaacatcacacaccggggcctgttgtggggtgaggggatgggggagggatagcattaggagatatagctaatgtaaatgacgagttaatgggtgcagcacaccaacatggcacatgtatacatatgtaataaacctgcacattgtgcacatgtaccctagaacttaaagtataaaaaaaaaagaaatagaaacaattatctgcaacttagctaatattgtaaaataaaaaataaatagaaacaatcaaaaagaaaccaaatagaaatcctggaaataaagaatacaatgactaaaattaaaaattcaaagtaagctcaacagcagacttgatcaagcagaagaatcagtgagctcaaagatagagtatttggaattatccaggcagaagagcagaaagacaaaagaatgaagaaagcctatggaaattatgggacatcatcatgaaatcaaacctttgcattaaagaaagtccagaagaagaagaaagagactataaagcacatttaaagcaataatgaaaaaaaagagtatagaatcagaaaaaaaaaaaagcagtaagggctgaaaacttccctaattaggggatagatgctagcatccaagtacaggaggcacagaggtctccagtgaaattcaaatgaaagaactgctcactaagacacaataattaaactatcaaaaatcaaagacaaaaaaaaattctgaaaagcagaaggtgataaagaaacatatcacatacaaaggaattccaatacaactatccatggatttttagcagkaacccggcaggctgagggagagtggaataatatattcaaagtactgaaggaaaacaaaaataaaaacaacatggaatcaagaattcttcatccagcaaagctgtctttcagaaatgagggagaaataaaacattcccagacaaactaaaagctaagggagtcgtcaacattaggcctgccttcaggaattactgaagggagttctttaagctgaaacaaaaggcccctaattaataatacaaaaacacaaaagcacaaaatttaatggtataagtaatatagagccatattcaaaatactctatgactgtaatgatggtatttaaagcaattttatctctagtacaagggttaaaagacaaaatattaataacaagcatagctaaaaataaattgtcaataaatacacattacaaaatatgtaaattctgacatcaacgacataaaatgtgtgtgggggagtgaaagaatgcaaagttaagttgttatcagcttgaaattgactgtaaaccycatagtaacagcaaggcaaaaatctttaatagaagcacagaacaaaaattttaaaagattcaaatcataccactacagaacatcagaccacaaaggaagacagcaaaagaggaacaaagaagcaaaacaaccagaaaacaacaaaatggtagtaccaagtcatttttaaattaataattaccttgaatgcaaatggactaaattccccatttaaaagacataaagtgactgaatggatttaaaaaaacaggaccgaaacatatgctaattacaagagactcacctaatttttaaggacacacatagactgaaagtgaagagaaggaaaaagatgttctaggtaaatggggactaaaagagagcaggggtagctatacttatattcaacaaaacagacttaaagtcaaaaactgtacaaagagacaaaggagaacattatataatgataaaagggtcaattcatcaaaaggatataacaattgtaaatctatacatatccaacattggagcacctaaatatataaaacaaatattaaaggttgaagggagagatatgttgcaatgcagtaatatcagggaatttcaacatctcacttttaaaaatggatagattatccagaaagaaaattaataagaaaacgttgaacttgaccaacactttagatcaaatagacctaatggatacatacagaacatttcatctcaagcacacaagaaacattctccaagatagatcatattttagcccacaaaacaagtcttagcaaatttaagaagactgaaatcgtttcatcgtatcaagtatcttttctgaccacaatactatgaaaactagaaatgagtaacaggaggaattagaaaaaattcacaaatatatgaaaattaaatgacatgctcctgaacagccaatgggtcaataaagaaatttaaaaggaaattcaaaaatatcttaagacaaatgaacatggaaatggagcataacaaaacatagcataaagtaaaagcaattctaagaggaaagcttataacaataaacaccaaaaaagaagaaaaatttccaataaagatactaatgatattcctcagagaagtaggaaaagaagaacaaastaagctcaaaattggcagaagaaaggaaaataataaagattagagcagaaataaatcaaatagagactagaaaaagaatacaaaagatcaatgaaacyraattgtttttttaaaaagacagacaaaaacttttagctaggttagctaagaaaaaagagggaggccttaaatatataaaatcagaaatgaaagagaaattatggctgataccacagaaatacaaaggatcataagagactattatgcataagtatacaccaataaattggatgatctagaagaaatgaatgcattcctagacatatacatactaccaagactgaatcatgaagaaatagaaaatctgaactgacaaataatgagtaargagattgaatcagtaataaaaagttttccattaaagaaaagcctaataactgttggcttcactgctaggttctacttatcatttaaaaagaatgaataccaatccttctcaaactctgccaaaagctggaagaggaaggaatactttcaagctcattttatgaggcaagcattaccctgataccaatgtcataaaaagacattacaaaaaagaattacagaccaatattcttgatgaatatagatgcaaaaatcctcaataaaatactagcatagcagctaagcatggtggcatacacctgtgggtggctgaggtggtaggaytgcttgaactcaggagttcaagtccagcctggggaacacagcaaaagctcatcacttaaaaaactaaaccaaccaaccaaccacacgaaataaactagcagactaaatccaacaatacaktaaaaggatcatctacctagtcaagtgggatttatccctgagatgcaaaaattgttcaacatatgcatatcaataaatgtgatacattacatttacagaatgaagggtaaaaaccataccatcatcttgttagatggagaaaaagtatttgacagaattcaatgctcttttatgataaaactctcaccaaattagatatacaagcaatgttyctcaacacaataaagggcatgtatgataaacctatagcttacatatttaacagtggaaaattgaaagactttcctttaagatctggaacaagacaaggatacccactgccaccatttattttcaaagtagcactggaagtagcagcaagagcaatcaaacatgaaaaagaaatgaaaaatatccaaattgacaaggaagaagtaaaattttcactgttggtgatgacattatcttatatattggaagctcaaaagacttcaccaaagggctgcaagaacttataaatgaatgcaataaagttgcaagatacaaaattaacacataaaaatcagtagtattttctgttcactaacaatgaatgattgagaaagaaataaaaacaatcccatttacaatagctataaacaatatgtagaaataaatctaatcaaggaggtgaaatgtacagtgaaaattataaaacactgatgaaagaaatcaaagagaacacaaataaatgaaaaaaatacaatgttcatggattggaagaattaatactgttaaaatgtccacactacccaaagcaatctacatattgaatgtaatccctaacaaattactgatgtctgtctagttatggaatcataagtgtcatcaacagatgaacagataaagaaaatttggtatatacacatagaattccrttccattttaaaaaacaagaacattctgctatttatggcagcatgattaaatctggaggagattatgttatgtgaaataagccaggtataggaaaacaaatattgcatgttctcatttgtatgtggaagctaaaacattcaaattcacaggagcagagagtagaatggtggttatggaggatgaagctggagtaaaaggaaggtggtgttcaagggacacaaagtctcagacagaaggaatacatttttttctttttgggatctattgcacagcatggtgaatatagttaataatagtgtattttatgtttcaaacttgsttagagaatttcaaatgttcccaccacaaaacataagtatttcaggttagcttgatttaattatttcacattttattcataaatcataacatcactttgtatgctgtatatatatacaattataaatggtcagtttacaatgtaattaaagaacaacaacaacaaccaaccaaacaaaactatgcatatctatgcatatgctctctgactcaggaatttaacattttggatctaccctagctgtacttgcatatgttcattaagaggctcttattataattaactaactaattttttaaagctagtgaatagttgaaaaaaccaatataggaagactaaaacactaagcagaattgtgatgtatttatattataggcttaaaagcaattccaaggaaagacctagatctacaatttaacataggtaaatctccaagacaggatgctgaktgaaaaacaaacagtgatttatagaatgaaacttatacagtttattatatgtaaatcacacawccacaaacatatacatctacacacattatttctaaagataaatggatggcaaagtactgaaaaatgttcaggggggtgacattaacctttaatgtgatgttctgtttttttttttaaagaagaatatatttttgtaaaattaggtaggcacatttgattatgttggtaattaaaatgaaatttagtaaaactatttgatgattagcccttacacttaagagatacatcaaaatgagtaactcagaaacggagaagtcatgataaaaggattgaatgrtaggtaatcagttcacttaaatgtagaaataaggctaaatgacaaggaagttatgtttttagggtacattttatgtgttacatcttggcaacagatgaatagataaagtatttagtacgaaaaacatactaaatttgtaggtagtcagagaaaggcaatgaacctatgtatgatgttgattcaatgttggtttggggtgagaatgcattgtgctgataaatttcttagtgtattaaatttttcctgtaagtttcttcagttccttctcaaatgtttgatagggcattaggtacgggataggcatcaaacagatattaatatgacaataatggtaaaggccatgacaacttttcctttgggaaatagcaatcccgttatcaaatactgttggctatgtaaaactcagtgttagaatgccctaaattcagccgtccatagtttgcattattaattatttaaggaaacatcccttttggtaatattaattttgattctacccactttctacctatgcccataccatacactggtcagaaagtcatttggtgtttgcacaggtgctgcaaaagatcaagactcagaatgcaggcctagggatattctgatcaaattacttggccttcctaagaactattttccacatttgtcaaatgcattgatggtgcttcaggtcttagatcacagagaaagtgtaggaataatatataaatgttctttgaactttaaatgttagactttaatgttttttaaattatgatggttgactcttacctgatggacaaagtagggagttgaatgttgtttccttctctagtccttcaggctttaggtaaaagaaagaaaagctagtgagaatggactgaccttcagaacatgtgttttaatggagggaccacagatatttggatagtgaagagaaggatttgaactgtattatctaagaaaattctgtacatataagcaatatacgtaggaggtagttcgatgcatgaacaaatgaaggaaaaattaagaaagtaaatcaaagggaggctgtgcatggtggctcacacctataatcccagcactttgggaagctgaggtgggcagatcacttgaggccaggagttcgagaccagcctggccaacgtggtgaaatcctgtctctactaaaaatacaaaaactagctgggcgtggtggtgcacacctgtaatcccagctactcaggaggctgaggcacgagaattgcttgaacccaggaggcggaggttgcagtgagcagagatcctgccactgcactccagcctggatgacagagcaagactctgcctcaaaaacaaaaacaaaaacccccaacaaaacagaaagtaaatcaagagagagataggacagagagatacatgagaataatattataaaatatccatatattattatattacccacatatattatatattattgtggactatatattatttaggtttacttacttcaaccaacagaggcttgatgactgtgtctttccttccgtgttcaggaactgaaggcacctcagtcccacacagctcttgagactctagtgcctctgcgctcacagtgaaattcacatttcctgwaaaaaaaggccagtagaaatgaatagcatcttccccttcctccatgcctccaaactcaagatttagaaatgttcaatgctctgtaaacttttgttttattaaaacacagaagcaggaacggaaacatgcaaatgagaggtgaatgatactgagaattcaaggtggagatgttgaggatatccttgtaggcatcttagaataaaaggcaaaggaaaaaaatcgcagcatctagtggtcttttcctgaaggaagtagcactcamtataaggttcccactgccatatacaatctttgagtagasaattatctctagcagttttttgctcacctaatgactttggggttactgcccaggacacagtttgccgcccgtttgcacagatgcagtgaggcrcttgttccttctccactgggacagctaggaaggcrggagaggcttccagctgcacactgacctgaaaccacacataagaaagggagtagagagggaaggagaasagagggagaatgggtttgaagtaaagcatcttgaggaattggttagatttcaggttgcctcacattaaagatgatataaatgaagatcaagtacctgaaatatatttaagtggatcttaatgtatcagatttacacaggtaaatctgagttattttggaagcaacctgctctttcacatgatgggaccagaggaagggaaaggtaatgatggcatgctgctctacctctttggtctggaactttgaccattcccccggatctcccggcagaggatacaagacttataaacagttatggtttcagcaaaggtaagatgctcacaaacgacttttaaaattaggtttaatataatgaatgagctacgaaaagttaaatatatgagatcgtagaggttgaaaccttgtagaatctgtcatgagaatagagtactgacttttgtcacccctgtcagaattcttcataccacacaaatactaactttgaagggttataagggctagaaacttgctttatggtgcaatttggtatttggagatctcaaaacctgtaacttttacaatcatgaatatctagtaagcatattttgcatacaagagtttgcagtattcctaggaatgcaacttttaatttacttgatggctaccttgtatttaatttaggaaagagatccttacccggatgcatttgggaaggtagtttwggaccgtggccttgagtgtgaaggcctctccacgaatcacagagtaaggcattgtgagctccacaaagaagggctggaaggctcggagagaggcagtggaagagataccaagtccagcatcttcagacaggcagaaggcccctgccttccactcggtgatggtgtcagggactgttactcctacctcagccacacctgctgagctggagaggagtgtaagtgaagaacagwaagtaagcagttaaatacatcctttctagggagagaatccctaggaatkattctactgccatgacttaaaaacactcaatagaaataccaataatggagagtataatcaaggattgagatgggaatataagtccttttcttccaactgtttttaattgtagtatatcagaattgtagcataatcttttacagacaatatagttataaatttaayatgcagtttgagattgttcttaagttctcttctctaaaatgctatttcactgagggctgctttataattttaaattctactactattgtgtatagtgggcctgactgaatctgtatttaactcaggattgctaaccagtgagggatctcttacaggcaatctgtgcagtccttggttgtattaggtccttatgcccattttctggaaatcttagaattaaatttgcacaaaattttttagctctgatgcaattagattagtaagacttcttagctgatgtatttatgttaaacatctcctgaaattagcaatgcgtttgaaagaagtacttcagtactgaaaaattagctaacagctcccagtttctccctggaasggcttcgtctacccactttatcagttgctgactgagtgttgggcttctaactagcctgcactgggaagcagaaggagcagggaaacgacagacttacaggaaggctgaaaagcagtaagggcacttcccatgcctccttcccctggctcgccccacggataaaaccaggtctgaacatacccctgggaataatttgtctatgcatcaagcaccccaatgtttacagctcgtacctaagggtctggctcctaaatcacctagctccaggagtagatggagctctgcaatcaggagtctccctagaccacagtgaacacagaggtggttttaaataggcctttgagcaatgccagtggctaccygcccccaccaccccttggctcaatacagagagaacaggcaaaatctcccatttctggctgtctcctaagggttgggcttctaaacagcctgcatctgggagtgaaagggagaagtaaacaagactccaggagcctgaaagggagtatatggccattccggctctttctctccacctgccccactggcttgtttcasggataaaactctgtttccagtgtctctctggaaggaatttgttcactccccttggtgcaaatgtacattgccacagccattatggaaaacagtatggagatacctcaaaaattttaaaatggaaactaccatatgtcccagaaatccctcttctgggtatactcccaaaggaaatgaaataagcaccttgtagagatatatgtgttttggtgttcattacagcattattcacagttgccaagatataaaaacaacctaagtgtctgggtgaatggataaataaattgtggctatgcgtaatggaatattattcagccttaagtggaagaagatcctgccacttgtgacaacatggatgaacctgggggagattatgctaagtgaaataagccagacacaggacaagtactgcgtgatcttacttgtatgtggatgctaaaagaagttgaatacataggaacagagagtagaaaggtggttggggttgcagggatgggaagaagcaggtcaaagggtacaaagttgaagttacgtaggatgaataaatttagaaatctaaagtacagcatgaggactgyagttgataatactgtattggatactgaaacttggctaagaggatagattttaggtgtgcttgctatgcacacaaaaataggtaacaatgtgagctaatggatgtgttaatttgcttgactgtagtaatcatttcactatgtgtatgtgtatatatatatatcaaaacatcatgttgtacatcataaacatataaaacaataaaaacagaaaaactagcaaagagttgaaaatagtcagggacctctattgttgcatattgcatatgcaggaagttacttactttaccaccaccaaatcccagatccatgtctcagggaagtactttcgtacggtctccgtgtgaggctcttcaacatgcaccaggcgtgcatggcctcttcccattacatctgactctatggtgagtgaggaagaagacattacaataaacatacagataaagcttatgagagaatgtaatagttgccaccaaaaaaaaaaaacaaaaaacaaatcgtctgatgaaatagagaggaaggaggagagggcgcttgggtcatcaaggaaagcttctttgaggaggaaatatgttggwtgacttaacaagccaggagaggccgggcgcggtggctcatgcctgtaatcccagcactttgagaggccgaggccgagacggcgccactgcactccagcctgggcgacctgagcgacagagtgagacttcgtctcaaacaaacaaacaaacaaacaaacaacaaaaaaaaacaagaataagctaggagtgagctgggggaggagggtcataagcagaggctatagagactttggcagacagaggcttggattgtctgtggggcacaaggactctgtggagtcctatgtggctgctgccgctgtgctaagtggagagtgttatgacacaaggccgtgaagaggggcaggaatccaagtttccattggtgtgctcctctgcaggagcaaggaaaaactgacacacatgttatgacagtggctttgagaaacagtttacaggagggaaaagtttaataataataaagactttttattctctatcgtgtcagaagattacagttagtttccttcactctattcaccttctattaagggtgtgctggtcaatatttcacaaccagctctctggaaaaaaaaattgtgcatatatatatatatatatatatatatatatatacctatacatgcataaatttactatatatcttactgataaaggattatacaatataatttataaataataaaatatgcggtaggcttcatagtgaattccatagagccaactgattctccttaaatgctttccttgatttttgaccctcttttctctgtactcaacttatcctcaatcatgatttgacaatatgggactataaataaatgcttgattactattcagttcatcaaagaagtagctcatgtcattgatgaatgtgtgtggttccaacataaatattggctgatgttttggggaagttgaacagcttttttacctgactgatggagaatgtagtgttgttgtgtgaacatttctatttctgtttacactaatcctacgcttggaaactttctctttcctttcagcctaacacatgtacctccatttactagaatttgagtttatattactatatgaccttgagcaataaccttaatatgtatgactcacatgtcctttttgtttgttaatttttgtcacattgtatcttttaaaaaatttaaaatttggtgaatatattaggcaatatatatttattaattttttgtttaccataaaaacctacaygtagaccttcaggtccatgcatttcatactgttgaagctgtggacacattttgggtttacgaatctttgagttggtgaatgcctttaagcccatgtcctgcaaagaaaattatcatctaatcagtaaatatatattataaaatatacataggtagctacttctttttattgaatttgacaagcaatccagttaacttaaattaaacttttaacattcacatctgtagaagggatatttatatacttaaggatgtaattttattcttttcattaaactctttcaacagtaattattttgtatatgtgattttaataaacatcacagagcaattaattcctgtgaaaaaagaaaacttgaataatactccaaaaagttccagcttagttcagcagcttttcgcagatctgctgctattagtagagaagccacttacctctttatatcccattaccctcaactaggacatgaaggcattcaaatacagactcttttccatgtgtaatattttaagaagcttaagatcagaccatctgcaacataaggagtttacctctaggaagctgtacatatccttttcatttgtacttgatactggagtatatgtgattccattaatatagacattatgacgattgatgcagtcttcatygtcctggtcattcaaaggcccagggaagccagtgaggtccttttctggtagcaggttgtaaacctgtacaaatacgaaagacaaaaaggcaaacttatttgtgacttttttttttttttttttttttttttttgagacggagtctcgctctgtcgcccaggcyggaccgcggactgcagtggcgcaatctcggctcactgcaagctccgcttcccgggttcacgccattctcctgcctcagcctcccgagtagctgggactacaggcgcccgccaccgcgcccggctaattttttgtatttttagtagagacggggtttcaccttgttagccaggatggtctcgatctcctgacctcatgatccacccgcctcggcctcccaaagtgctgggattacaggcgtgagccaccgcgcccggcctttgtgacattttttaagttcaaggagaaaagaacaggaataatgaacatccgtctttctttgagcgctctcattgctttgatgatttatagagggtatggatcattttcttgacacagtgttttcattttgaagatgtttaacaattttaggaaaaaccaaacactccatctaagtactcatctaagtactaagtactacttcgttacacagttcagaggccaccactagactcaacactggaatgaaataaaactttattaattgaaaaatcgaggtctgctgtatttgtgacattgcacaaagctttgagatgatagaaggaaatgatagttttgtgcttatcttgtggtgagcaactgactcagtatatagcaaagttaatgggtgcatgttctaaacaggcacacgaataggaatatcctctctccacaggacacgatggcattttcttaggtattattagtggaaacaaaatgctccagatcttcatataatacatacaactttaaccgtaaaattctaggcatgatgctttcaagtccatttgaaggtgagaagtaagacagacataaaaattgtgatagttacattgcattatattcgtaggagtttaaaactgattgacaagaacagatgagcaaagtgagtggtgtgatgaaattagacactttctcaaagtatcttaacatttctcatttcctctccctgcttttattgtggcatattgcataattattgtctgtctcatctatgggacagacaatgtaagttccatgagacatacatttttatctttccagtagctcactgcttgatctctactagcacttagtataatacctagaacacagtgggcattaaataaatgtgttgaatgaatgacctacactagtagcagcaaagtgtttcattggtaagacactaatcaaagcttgagaagagttggtgttttaactcaggtctactactaaatccctgaaagcttctgctttattattaataaataggactgtctgccttatctacccatcagggttgttataatttgaaaaattctttgagaattataaaattatattataaaagtataaaacaygtatattattttcccacatatcctcttgagatcctactgttgaaatgtacttgatgcttcctttagaagtattctaatattttcagttaaaatcccattagaaggacaaacaagtaagaaayatttttttataagtttctatttcaggaaaataaaaatataaatttctctttgttaaattatggtagtagaaaaagcttcagtaagaggttattacaattggtctcatattaaaaatttgaagatgtgagcaaactactattagtacatgctattaactagtttttgttgttccaattcagcatatccttttggtatttcttctattagctccatattttcaaagagttcagttatcaatgtcaattatatagtagttcaatttccctaagttttgttcctcagagataatacatatgttccctcagaaattatgtgtagcttgggacagcaattatttcaactgatgtaattctttttttttttttttttttgacaccaagtcttgctctattgcccaggctggagtgcagtggcacgatctcggctcactcaacctctgcctcctgggttcaagtgattctcctgcctcagcctcctgagtagctgggatgacaggcgcccgccaccacgtctgactaatttttgtatttttagtagatacggggtttcattatattggccagactggtctcaaactcctgayctcaagtkatctgcctgccttggcctcccagtgttgggattacaggcgtgagccaccaggcccagccataattcttataaaaacggaaatctgatatttcatttagcctgtatagcctcagtgcaggtatatgtatcacttytgttaggctttttgaaatgttgaaactagtttgacaactcctattactggttgcatggagctctgggattttaaggactttgggtactgtatggtctttttacattttaaatatataattttcgaacggcttccccggttgctcagttaatcctttcttttattttgcataactgcacttctcatatagcacttttcacaatctgctctgtattctctccagccttgcatatacggatgtcctgacacaatcagaagatttgaatttgtattgctatgtgctcttgagcaagaagcttaacgtgtctgaataacgagtccttttttggttgttaattttcatcacattttgtccttttaaaaattcttttatttgattcaatatattgtattttgtttatttttttaactgcagaagtgagtagttatatatatatatatatawaattccttaccaatgaaagcccacaagagagctcaaagcaattaattcctagataaatataattttaattgatcttatcctacttatccagtcatttttccttgctctgagcccctggcacggcccttcttgattcctgaggctgccaggaactcaccgaggacgccgagagctcagcatcaggcttcatgagcagcacgctttggtccacagcacggagggcgcagacggactgaggagccgctgtgactcgcaggtgggcgtgtgaggctgggagactttgtgatgggctgaagctcaaatccacctgtgaaattggaacaaaaggtcagaaaagcaaatttccaggtttacccatgcattcrctcgcatttgcagagtgttcctcatgtacaatgtataaccactctgcttgacttcgtggagggttggcattgtgtcaatcctgaagctttttgttccctacacttctctttcattctcaagaatcacttgagccagtagaattatttctaattattcttataaattactagtcatgaaatgccatttttatctttgatacacggcaaggtgctyattaattgtggtgggacatgcatgggtctaggtgctcttgcatttttcttttggctccttagtagtcttaaaaacttgcttacatatttcccaacgtttcatcatagaagaagggaataacatactctgaactgtgtaattggtaagaggcactgctaggagaagtttgagagttttgtataaggaatcaagtgattctgcttcttagtgtgactctgccactaccttgctgaatgwctctggggaatttgtttaacccttttggccctaatgttcacatgtgtaaaacaaatgataacaatagtaacttctagttttacatgttgaagattttatgatctaaaacacacaccttgttggccagacaattttcaacatcatattttgcagaatccccaatcacgtccccggtaggtaaaacagcatagatgagcaaccgagcgacaggagcaatgtctgacttcacagggattgagatggaaaaatggcccttcactggggcacaaagagaatgagaggaagccatcataggttaatgactatttccattagtagatgtaacagacataataaacagtagatgtaacaaatggatgattacctctaaggactctagctttagaaaaaaaccctatcaaagccctctctcctctcataaatcatatactctgttgatttttcaccagctttaagcttcagctcacccacctaatgttctgatgctagttaagggtatgaagacatccaattcactaccatttgatctaggcctcatactagaagagggaaatagaacctgaagttatgagatgtaagagtaagagttcaacacattgtattcatgctacatgctctttaaccttctatgagccaatatttggttctttctccataagaggaacaccatgctccttcagaagttattttttgatgcctatgtagattctttagaggttgcattaagtttccttcagtctgctatggtgcttctgtgttgctacaagaactaatgagagagtagattactgatacttttctagcaagttatcttttagagtctactagactaggagcaaccttcaaaggtttatattatgacatatttgctcatggcaagagtccgcttcagtcggtagaagtacccaatttaatgcttcataaatcataactatcttgaaagggaaaaaagatatttataataatataaatgacataaatgactcagcacaagacctggtatatacaacataccttgaaatcgtacattttctccaccccattctctaacacaattctcattttgagaagaggttcaagaatatttatggtttaaaaatctggaataagcatagattatacacaacaatattttatgtattttatttttccccctttgttcttatttatttatttatttatttatttacttttatagagatggggtctcactatgttgaccaggctggtctcaaactcctgacctcaagagatcctcccatcccgttctcccaaagtactgggattacaggcgtaagccatcatagctggcccacaccaatattttaaataacgcaaagaaaataggctgaaaaaaaagacaacacatatttgataaagggtgagaaaaaaaccattattgttttccctccctcaactttcttttaattaatattagatggaaatggtctctcrttacttgaaagtattcctgatattcccagctcaggaatggaaaaccaaacatcatatcttctcactcagaagtaggagctaagctattaggaagtggcagctaagctattaggaagtgggagctaagttatgaggatgcaaaggcataagaatgatacaatggactttgtggattcagggggaagggtggaagggggtgagggataaaagactgcaaattgggtacaatgtatactgctcgggtgatgggtgcaccaaaatctcggaaatcactaccaaagaatttattcattcatgtgaccaaacaccacctgttcccccaaaaacctatggaaaaaaagggaaagtattctgatacttccgtggtgtaaggctgaatgggtcagaatggggcagcaatgcagagatgatggaaatactcactgtcttcctgcttcacaagcagtccatgagtcccagttcggacaatgcctccctttgccattatctgcaaaaaaggaaataaaaagaaattaaatgtgccagagagaacacgcttcagtctcacttcaatatacttgttttattgagtccctgcyggcaataattcacctcaagagaaatcaaactttcaaaaggaacatggataagaagttgaagtaatgacatctaaagagcttcatgattacttgctccacagagagcttttgtctacagtgaagtcaacgcagtaacctcccttctcaccagataatagaaggagagcttcttcagccccagcagggtgcctccattcagaatataatgtgcctggactgtctgagtatggccacagggtagttcatgagacatgggctyaaggtggacaaagctcttgcttggggagaacacaagataagcagtgtgatgtgcctcttcgtgttcttctgayacccactggtagccrtaacagggactaygatccttgtaattgacctaatgaattagaaaaattatattatttttagattatacgtcataaagattaatgttctcacaaaactacgtaagtttactgtcctaccttaactagtagctagaaatcttttgwtccacaatgaaaagtgggagaaggacccctgattttstttctctgcttcaaatgtaggcatgctttgtgactttacactgcagagcctcctgggattgagatttatatttcttaagagcataaaaggaggcatcctttgctctgattagcttgcttgaaatttctttgactgctttacctgtgcaattagagacactggagctatgaaacttcattgaggagagtaaataatctctagaaatggaagaactgtgctttcagaaagcagctgcctcttttagggtggattttgaatgggtattatgaataaataaaatattgtaaccttaggggtctgagaagacattggtagaaagcattggtttaagagctgagctgatgaattagctgaagtctasctcttctgggctatcttaggctgattgctattattattatttttttgagacagggttttgctctggcgcccatgctggagtacagtggcacaatcttggctcagtgcaatctctgcctctggggctcaagtgatcctcccagtcagcctcctgagttgctaggactacaggtgcatgccaccccacccagctaattttttgtatattttgtagagacagggtttcaccacgttgcctaggctcgtctcgawctcctggcctcacgcaatccacccacctcagcctcccaaagtgctgggattacaggcgtgagctaccgtgcctggcctaggctgactatttttaatgctccctgcaatctggattctaatacctcagaggccctatttgggttatatttccaacttttcttcctgtagaagttattccttagctcctttcaggcttcctctaccttcatccccagctcccaatagcactagtgaatccttgagcaaaacattttgttcatatcttaatgtatattttggtgacaacayatatatgatcaccccaaacagggaacaggtagaaataataatttcattgtcaagactagcacagtgctggcacgtggaaagcattcaagacactttttgaaatgagtaaacattcaaattagagggaggtgcttttatgccatctattaaagctaaataaataaaatgtattatttatttctctataacaaggtaaaactctaaagaggcaggcgttttccattaccatgattatgtaatatatattaaatatgtattgtatatccatgtatctatagacatgtctacatctctcttgatgaatagaggactgcatgctataccgaataacttatattggtatgaacaggtcatctggagaaaattagaatagcaagacaaaataaagtaaggtaataatttttggagtatatatatttaaaactaaatgctaattatgttagaattggcttttatagtaaaagtatctaacagttaaagggggcttactaagtgattcaacatgtatkatttcacttaatcttcacaaccaccccaagagtcaggtgttagtattgcaatcattttacagataaggaaatgaagcacagaggttttagttaattccttaaaatagggttgagccagtatttttaaccactttatctgattcagattctggaattcacacttttcaaaaaagttattataaacacacacacacacacaacataaaattaccatcttcattattctttagtgtacagtttggtagtattaagtatatctgttgtgcaacagatctccagaacttttcatcttgtaaaactaaacctgaataccaataagaggaattccccatttctctctttccctagcccttggcaaccaccatcctgttttctgtttctatgactttgactactttagaaaccccatgtacgtgaatcatayagtattggtctttttgtgactagcttatttcacttaccataacgtcctcaaggatcattcatgctgtagcatgtgacaggattttcttcccttctcagrctgcataatattctgttgtatttatataccacattttgtttacctgttcatcccttgatggacatttgggtagcctcgatctctcagctattgtgaatagtgcggctatgaacacgggtgtgcaaatagctctttgagaccccgttttcgattcttttgaatatatgtccagaagtaggattactggatcatttggtaattctattttttaattttttcaggaactactatactgtttttcatagtggctccgccattttacgttcccagcaacactgctaaagtctaacccgcacttttaatcacaatatactgccttcttttcataaactttaaaaaagttaaccttcaatyggtttctaattgctagtttttttctctccatagaactagacacagtttggaaattttctcacccttaggttgcaaccttgtttccaaggctacttcatgtcattggtaatttctttccaaacttaccctaacagtaagagaggtacccataacattggtggtgttgatagagaactgtacaaggccatgctcatccgtggtagcattggagtaatagtttgcttcatttcctctgatgaatatgactttatttggtatagggacgcctttcccatctactaggcgcacctgaagattaaaagctgtggattagttatattggtaataactaataggcaccaaacatattcatttatcacattttttagtgcctcctctatgttgaacatggttccaggcactgaggacacagcagtgaaaaaaaaacgaagtttcttccatcacagagcttactgtctagtgaaagagatagatgctaaataaatatatacataacatacactaatttagtagtaatcaatcctaagaagaaaaacagagcagtgtgaagggatagagagtgatagggataataacaagagtgacctgaaaaatgtcttctagatattttggaagtgctgtgtattattatatataactcttagagagtcacagagcactagagtaatatgataatgaaatattttaatctattaatctattaactaaatttatttgtgccccaaacacctattttggagtggaccattaacttcctatagattagtgtctgaagtctcataagtgcacaagtaaacaattgccaatacattgtcctgtgtgtttctccagttgccttagacatggtctctgcttctcaacctagatcttcagccttttggaaggtaggcagattttatgacacacttcccatgtgaaaaatataaaattgaaaagaggcacacagtattaaataagttgccaaatctaatttactgctaatattgtattggcagttgagtagtccagttcagattgtaaaggtggcaattctttttcagtataagctacagttggtagcaggaagaacaataggctgacccccatcagtactcataattgatttacaaaatctaagtttgccagtgaaatgttggctgcatgtacaaagacaagaataggcacataattctgattttcttctagctagagagtcttatgacaaataggatatttaacagcaataaaatgtacttacaaagtacactatctttctgagaaatttacaaatgagctacactttcattttaggaagttgaatacattttggtgtcatgacataaccaagccttctagaatgtactccactttgttgagtctatgcctcttttacacccttcatagctgaaatcctgtaacatttacattaagaaaatgatacacagtaaatacacattgaggcacatgtaactgtgatctcagacttctagagtcataaagatccatttgcacatctgctgacaacagaaaaattgtaagagaagatttttttggtagataacatgaaaattcataattcaaaaatctgagaaccttaaatagcagtgttttaccccatgttcactgttttagaaatatacttgttatagaaaaatagtgtaaatatactatccatgaaataaacattattgtagaatctttaatacttcaaaataaaaattaaaaccacctacccacctgtttccatacaaagttagtgttagcatcgtaatgaaactggtcagcatgaattttgagattcttgtgagaaaatgtcataaaaacctgagactgcctggtaaaccatgagaaggagattgagtgacttgtacaatgctgtttcaaaagaaggggggaaaactctactaattttaataaggccttaggataattacatacatttcatacacaaatttacagaagaataaatctatttttatgtagttttatacctttggttatactaatcaagccttggtgatattttatacttttggttatattaaatgataacattaaccaggcatggttttagcacaaaccataactattgtgctaattaggtaacagtacatgggttgatgagtgaactggaraatactccacctgcccaaagaagggaattccctgtygaaagtgtgagtccactttcacaaatgagagtttggttatggttcttgtgatttcactggactgccttccagtcaattccaccactgaaaaaagagaaaaaaatctgttatttttgggaagaatgatgtctctaaaattctatcacctccccccaacttacaattcattatttggctaagaaaatcaatgcctgttgtgttttctcttatacccatgtwgtacacaaacctgttccttcttcttggatctgggcctcagtgtgaagtttcatttcatactccttcctcttcagctggaagaccttggtttttacttgctgatagaagcagccatggctgtttagctaagaagggagaaaataaaatacaaaaatataatgcatattatactaaatagatcagtggtcagataaccggtgtgatttttgtggggggacaacatcatgtaggcattttctatgacgaggacacaataaaatattctctagcaactaaatattaaatttcacaacaatatctcatgtataattgacagatgtattccttggtatctgaaattccctagatatattgcgatagaaatgtcttaaaatttgaggagtaattttttttgtacaaaggatgcataatatttatacatatttatggggtacacgagatattttgttacatgcagagaatgtgtaatgatcacatygcgggatttagggtgcctaccaactcaagtatgtatcatttctatgtgttggaaatagttcaagtcctgtccacttgctattttgaaatacacagtacatctgctcttgaccattagaactcctcatcaaagtctggttcctcctccataatattcagctgtggctgggaagcggccttctatatggggactgtgtttgtcaactctctggcatcttggtggggccatgtgataggttcttgttcacagagagagcagaactgatggcctggccagctaaggcaattaagaggtgtatggttttttccttcctttgtagaagtgaatgcccatggaggctttagatggctcagygtctatcgttctgaaacactcacaatgggcaattacgagaaataaataattcccattgtgctaagttcatgattttttttgaaaaattacaatagccaacatggaattctcttctagattgttctcttcctgcgtcagaaaaatgctgcaactcactgcttttcaacaatgcctttatcgctattctctagaaaaaatagtgttcaacctacctgtccactgaatttctcacagaaagcctgtgaatcttcaccgtggcagtcggaagcgtcactatactttctgcaaatgctcacagtcacatgtccagggacaggcttcccatatgtgtatctgtcatgagavcattcccaaaggaatcagagcagacacygaacctccccattttctagctatttatatctcccctttagctacagtatattccctgtctgtacttccctctgctctctgctgggctcacacaatattgaagacaagagtcactaatggctcttatagaaatctccattgcaacatgctgaaatttacattcttcttttatcatttcttttttttcctcgtttttttttagttttatcttaaaaaagtctttcttattataaaacttaaacccgttcttaaaagagaaacaataccagcaagacgaaacaaacaaaacaaaacagaacaaaaaaaacccaaacgccctcaagtctacctaggaatacaaactattagtacgatagtgtctcttcttccatcatcctctccccatgtgcagccatctctatatcgagtttcacttgtttattttattttattttattttattttatttttgagatggagtctcgctctgtcgcccaggctggagtgcagtggtgcratcttggctcactgcaacctccacctcctgggttcatgccattctcctgcctcagcttcccaagtagctgggactacaggcgctggccaccatgcctggctaattttttgtattttttagtagagacggggtttcaccatgttagccaggatggtcttgatctcctgacctcgtgatctgcccacctcagcctcccaaagtgctgggattacaggcgtgagccaccacgccgggcctgtttacttttttacaaaagtgggattgtgtcgtaaatatgtcatagacaattgctgggtttccaagtgcatttgtctcctttcctatttgagaatgtcctctgtatgtctatttgcaagatcacaccagttatgaggaaccaggaacttggccatcactgtgagacagaactggagcaggggcctagctgaatagtaggtgtattacatgtgtgatctttggrcaggactatacctgctcttcctgctactgctactgtgtgccaccatggatgggaacataagatccaggaaacaagacttttcaaggttggaacagactgtcttgagaaatcacgttcagtctcttcgtaaaaatgtcagtgcagacaggtatgtagacccgccttaggtggactagtgagttagatgagatttcagttgtatgcctatctctacaaattctgaatctaagtgatttttccagtaagcatgcaaggtcaggtaaatgatctgttgatgattgaatttcccctatagccatgtgttaattatctccctaatatacgtttggttatttttggttaaggcagaaccaatacccttcaacactatccacccttcccattttgtgtgtgtgtgtgtgtgcagttttgtcactttcagaatcaatcctattagcataacctctctagaaacagtttcttacctcatgatagaataatactgataagaacgtgaaagaaaataaaaatagaaaagcaacaggagaataacattctacagatgaggatgctgtcaaagcacttaaaatttttgtgttgccactgctcccggagagagtagttaaaatatcccaaatggtgagtctcttttaaataatcccccacaaaagatttttaaaaaatgaactcacaggccacacactgatacattcatctcttcttccaagatggtgattatctttggcactgttacttgtacttcaaacttgggaagaactgttgattggtgataaagaaggttggtgattggttttcaactttgggggaattcctattttcaggttccctgtaacagttccctaataatattttagggctctgaaaaggtagctctgctctccaatctattcttatctatcctcctctcaaatgaagatttcagttgagggactatgagagatcactgtgtgcttaattaattatggaaaactccattaaaacaagaatgttttaattttgggggttggtattaaatattgctacagaaaataacgaagctatgtkaagtcctattcacagatcactgatgtcctcattggacttaggtgtaattaattctactccaagcccaatgtcacccatgggaaatggaaagactccaaatgaacttaaattccaggacctaagagtttaaatatgaagaaaaataatgcttgatgacttttcatgatccataccaaattcctccacggtgaaagggtgctctgtccttccacctgatttcttctgtaccaccaccttgtaggagccctggaagggctctgatgagaggggaaaagaaaattgcttgaggccaccctctaactggaaactctgccattgtgcgatgcgatttcctttgggatcctatatgagtaaattaattataacttacaaaagcacctggagcattggagctaataaaagatatctatggaaaccctaagttatctacaaaaaggkcaaatggggtagtagtaaagggtgagtagaggagatgagttatagccatctagctctatgggagtttgaaggcttctcctttaatgacaagtttctgagatattgtaaaaacctctgaaataagaacattttccctatatgtattgctttccttttaatatggaatgtttcatgttgcttacctgaatgtatactagtggaatctgaaagacaaaagaaaaaagaagtttataattattttcaaatattcttaaatctcatttataagcaaagcagctagtatttgctagcataacagggtgagtatagtaaaaaataatttaattgtacatttaaaaataactaaaagtataattggatttgttcgtaacacaaagaataaatgtttgaggggatgggtactccatttattgatacaggcatgcaatgcatgataataatcattatccatgattggataatgatatggataatgataatgattatcatccataatcattatcrtgcactgcatgcctgtatcaaaatatctcatgtaacccataaatatatatacctgctatgtttccacaaaaattaaaaacaataaaaagtttaaaaaatctaaattagtttcatatagaataattccctctatagtgaaatacagaaatattccagattaaattttatagaacttttcattaatctattttaagcaattaataaataatgttaagaacttactaggccttcagcaacaaatatacatgtaaagtgccatttactaaaaatggattaacatgtcttaagtgcttatagcatcctagtgaagwtcaatcctttgctatgcaattttacaggttgagaaataaacacttatgtaactataagtaaatatgttcagatgtaatcattaagatgggtcatagaattcttaygtagttctaagaatgaggaggaatggacatatttcattaataaatttagtttaataaatattacttttaaaaatgaataaacattgataagaagctactatgaatgtttattcatttttaaaaactaatctttattaagtaccttctcatgcgctgtgtatcattctaggtattgagaatataaccacgcacaaaagaacaataaaccatgttttaatggagcttatgttataatagaaataggcagatttttaaaaatcaatacgtatagaatggtggtaagtgcaaatagaaaaacaaagccaagttaggctgacagagtgatgggtgtggtgcctcattttagacagaggagtgaaagtagaagctgggagaccactttgaaggttattgtaatgatcttatttagagatgacattgactaggactagcttgcagcagtagttcagatgataagaaatagtctgaatatattttaagccaacatgattttccagtgaagtggatgtgggtatgagagaaagagaaacaagaactaggccataatcttttgtctttggagctagaagagaagagttgcctctttttgagataagaaaatgtgaagaagttaatttgggagagaaaaatgaagactttgggttgatgtctgcattacaatagaaagaactgtttcttatcacagataccaagagttagtcttgaggaacaaattaattaccctgactttcctttatagtgaagattttggtagatgtgtatagaaaaaatctaaatctttaaaatgttttttgagcttaggttctttgaggatttttctgtgtctgctattgaatgtatctttctaattgtcctaattaagaaccatccgaaaagtaaatttaattgtgtgacaactgactgagtaccagcaccaagacagaaagaattacctactttctttacctggaatgatgttttagattaggatcttgtgctgttgtaatgccagaagttactgttaatgataccagattcttcctctccctggtcttccctcagcacaaaaaacaggttcccagcctgtttatacagacaatcattttatgtagataatagaaaactcaccaactcattcagggggtgaaagttttcatccatggagacaacacgaaatttcactgaaacagaaatatttttcatgagcccccaaacccaaagtaggcctgtaggctggtaagacaagctattaaggaaccaagattataggaactttgcctggggaacatccaggggaagaagatctttcctttttgaagktgtcctgtctgtaggcttcttcatacctgtctgccctggtttgtagattgatttgtctgtctggacaaagaccagactgtcctcgttcttaaccatcactgtggtccgcttcttaaattcttgggttggtcctttcacttggacagtgaggaacattacctcctcattggatgaagactttgggacctgaaatacaggaccgatcctgaaaccccattcagcacccgcaggtctcctcccctatttgctgttgcactcttccctggagatcttgcccttcttacttaacttcactcccttgttctcagcagggaaagttggcatggacaggaatcacttctgccattttacaaatggggagacaggacacaaggtggaggaaaataaatcagtaagagaggttgtaagtgagattcacaccttcatacagctcacagaaacagtcttgattcaattatacgctgagctttaccaggctgatattacatgctaaaagggcatggtcgaagcatgttttacaggctatggaaaaaaaccccgtattttactgacactaggctgtaagcatctcacatgtggacaactctgaagagatattacacctttgctcagggtaatttctacaatttttactcttagaagtagtgtggagtgatgtgttcctgtcagtccaccacgggtggctcatgttgagccttggtctagtttgctttattaatattttttccatcttaattttaagaagtcacattttctttttttttttttcctttctggctaatagggtttctatgtgattattaagctgacttttagtttgcctgtaaatatttgtctcccatggctggakagtcatgcattgctccttaatttctatacttagtttgctacatttggattccttcctgcagttcttascaacctcccaaagcctcatctgacagaatactagatccctatgaccctgactaaaagaaccaagtatattaagtcaaacagccacactcacagcgaaggcgacacagtggagtacgtcattctccgcctccaggtcagtgaagaggctcctgtttcccctgacagactccaaggaagcacttacagtcactgtctcattcaggtagctcagaaggacacagcccttctcagtggtctcagtgtggagcagggaggggaccagaaccatatactgcctgggaatgagacggttcagttagaggaaagtgaaggaagagasgcattgctatcaacagcacttttttccatcatcataattatcatcatcagttctacaccaagagaagatgyactgatgagcatgaaatttggcygttgaaggccatgcataagaattatttcccttttccctcacatgccatggcagtgaacattttacttgaggtaggtcttaaacagattaaaacttgtaggcatgcttcactttaaggaacaatttgtgaacatctgaattcaaataaaaatatgtagttacatttgttcatgttgtaaaatctatttttaccttcaagttgctgtaaaaagtaagcaagctctcagtcatgcggacattacaaaaactaatcaaattatagaattttcattaaaatatatatacacacatacatacatacacacattcagcagccctgtgaaaattgtatggtaagcactcgcttccactccacagatatggaatctgagcctcaaagaaagtgagccattacttcacagtctcagttgtggtaagcagctaataaggtcttaagagtgttacctaaccatggatgtttgcattttaaatatttgcctttcagctcatgattagacaatggctccatccaaaaatggtcctctggtgattgactttagaccttggtaactcatgtgcagtacagaaactttctcagtaccctgacatgtaatttaagatcaaccctgtagtttttatacatttttgctcacagaactcctaaaataatttttggactctgtgcactccttacatattttcaagtaaacatatttttatcatgattttaagtaatagcaaaagatattatttttgatgatattttaaattaatacttagattacttttacaattttctcatgaataataaacactgtagtataagatacctactatcactatttaaaagtacattaaaaaattcttttaatggtctgatatttaatatctttctcttcttttttcctttttgaatttgaatttccatgccaattaccatacagaaatttatcctaaatttttatatttcaaaaaatgttgtgaattattcttacttctttattgtcaagcatctatacatatacgtatgtatacttatgttcacatatatacatatatgaatacatatacataaatacatatatatgtaacatatgtgggtaggtaaatttaactttaactcctcttttaaatagaatgtaaccataaatttataaatattaaacatttccttctgactgagctatgttcaaaaatacttgtatataactgatcaaaacaaaataaatacaaagtatgattcatacatattagatataaaattaaaatacttttgaagcacatctttaatgagaatgatgagytgttttttcccccagtgaatttatgcatccatggattgcaagaattaaacaacattaattctgttactatttttgttttgtgtagctataagtgctaagaagaatggctcacataaaagtaaataaatggcaggtaaaacaattgcatcattgttaccacttcttgcaacttctgcattacatgccaaaaatcacctagtactctattatcaagaatcccttctcatcactcatcagctggtatttccttcagttcctccttcagttgtgttgaaacaaagaattcatcaccacctcatctgcaaaaggatttctcttctgacattagagtcccttgctttttcaatatcaacaccagtatttcaaattgttcctttatttggcactctatagatttttatactccagggcattgttccatgtttggttgtgggagagaattgtctttatttttataaaatagaaaatggacccttgagaaagaggaaataagaaaagataaatagcatggtctcaagtagatcaatatgaatgtgaatatctaaaatttattcttttaaaaagctaaaaatttctgacaccccttaggaaggctttgcatattagagcttcagagagttggggaagaatgattaaaagtaagcaagtaatgagtaaactagatttgtaaaatctggaaggaatcttagagataagaagatgacagtatcataggaaagaaaaaggaakgatataaagaaaaatctgcaataaatgaargactctaggttcatgcttcacgctctctgtgtggaactcacggttttccagagactgaggcgtctgtgggcaggaggaccaagaggagaagaaccagacttggatgaaggagtttgttcttccccatgttgcagaaagaaggagctggaggagamcagactgtattgtaccctactccctacaatccatctggtcccaaacacttcccaaagcaactgggctttatgctgctctgtgtgcaaacaggaagttccacccacacaagayctctaaacaaagttgaggtctctgaacattctctggaaaggtcattgatggcctatttatagtcaaggttaattcctggcgggctaaatagaatccctggagggctaaaactacattcccattcccgtaagagctcacttttaccgtacagcagctaataagcttttcaacctcttctctccctcactcccccacaactcctcacaacgccttttatggtgcttctcacatctcttgtatgaatagctggcaaggaaaactacaatttaagcaacactgggcaggctcaaaatagatatttcactacaagtcagtgtggctgcaagttctccattagatatgcctaacctaaatgtttgaagccacatcagaattcagtagtcctctttgaaaatggcacgaattaaaccagtagctttttgacattagggatattactgggttgcagatgaagagccaggccctggaagaatgatcatagaaaagagtttcctgttttaagaaagtgaaacaaagaaacgtgaagtaacaggacttcaaaaacaaattttgacctattgtgcctaacaaacttcccaattgcctttaccatcgactacacagacttccttactgccttccaaatatgatactcctctgcaaactttaagtcatataaatgatttcattaatccatccatccacccatgcatttattcatccatctattcatgtagctattcagttgctttgtaagtattttttgatcctactagggctagacatcatgcaagattctagagatagggtggtcaaataagtatgaaaacaggcacttaaagattttacattcttgttggggcaaaaacagacagaaaaacaactactgtataaaatacaatataacacctactgtataaaatacagttaaaatacaatataaaactactgtataaaatacagtagccaaacatattattgcagaagttcaggatgctctgggagcacataagagagcacataacccagacctggaaccttttaaaaaaattttgagggaaagcaaaatgtaaattaagctctgaagtatgagtagtggttgtctcgaagaacaaagagatgaaaagagctttctaagcataacgaatgacagatgcaaaggagggagaagaatcacggcacatgcatgaaatgaaaactatttggtatggaggaaatattcctttctgatacttcaaatcagaaaggaatttgtcaacaatattaaggtattcagaggagtactcagtggattgacttcaggtttgtttcctggaaagcttgctcttattgaaatttgaaagggcagctagaaagaggtgatccaggatgcaggaagaccagatgggagctggtgtaataatataggtgaaagctgatggcattttgaactatggaatttgtggtggtattgaaaagagcttgcagatttatatcatatttaagaggtaattatagtgctcagtgaatatatcaatgtgaggaataaaggaaaatgtgtctttccattttcctggctcgtcacggagtgaattgtgttgcctttagctgggtgagtgaaacagaagaaacacagattggtgggagcagaaggaggacagaagggctgagggttgggaagatggagtaagtgcttgtgggatattcacgtattaatattcacaggagtttgacatttgaatcttgagcttacagcagtgtggtctactagaaatagaatgtgatcgccctgtgtaattttaaattttaaattttctagtaaccacataaagagaaacattaaattaattttaatagtgtattktatttaatccaatatatccaaaatatgatcatttcaacatttagccaatataaaattgttaatgatatcttaaagacttttttttcataatttgttttcacaagctggtgtgaattttatacttacaacatagatcaatttaggctagccatacttcaagtggccaatattagacataatataggtaatatttttcagattatggtgttagcatctaagtgggttgtaacatcatgccctgtgagtcatgaccaggattttaaaaaatgaaagagaatataataaaaaatacagtgtatcagacagaataagtgagaatagtgatttgggaaacatctgtttcatatacatgcagcagaggctggtggttgtttcctgttaccacttctccaattctgctttaataatagaactcccgatcctttgctgggtgcagactgcctagttgacttctatgtttttaacccactcccttgaagctgggtatggcatatgactaagttctggtgactggagggcaagtggaagtgatacatgcaactttcagttcatgacttaaaaaaggaagggtacagttctgcgcttcccctttcttccttgcccaggctggaatgtggacatgctgactagtgataggtactgctgtagctcatcagatggaagccatgtgttaaggaaggcagaaccacaaaccaggcacagcctgagcccttgagtcatcaaaagtctacgccagttgggacctttatgtgacagagaaatgcattctcttagttaagccattgtattttgaggtctgttacagcattaaaatctatatcctaaccttatttttctttgtcactatttctgtctcaatcatctgtatcctttactctaagtgtcctaggtcacaattgtgaaaatgtgattacagtgtcacagtgggaactgcttattgaacatgtacaaaatcccttatttttggttaaagttaaagcagtctgaatgccactagcttgatgagatctgctgtacttatagagactatggatttatcagtttattgggcaagctgatgccatggaaatggatgataatacccacgtagaagatgttgatgaaaagagaaaaagagcccaagacagagttacagggaatgctcttgtctaggcaatgggcaggagcacccaagtggagcaagaagggccaattagagaggaagaaacacaggcaggagagtgtgaggtctctgagtcccacggaagggaccgctttagtaagagaatagtcaatagaagattgctactagaccagaatgatcatgactttataccaaggcatcaatgttaatagcacacaacattttaaaaaattattacaaatgatggtataattttataatgtattgattcataatgtaacataatttaaatggtttctaagaygctagaaataagtgagcatttacttggattaatgacttaaaataggagggattaatgttaatagcattcatttgatgcctcatgataaattacaaagatgatctgtaaaggttgtcattgataaattcctggctacccatgtcaagtgccgctgtgaaatcaaataattgattgattttttttttctgctgggtttaaggacaaggacattgggattcagctgtttcagtgccggtgtggggcagaagcttgctgagggtgatggggaatgtgaggaactagagccagtttggcagtttgtctgaaggggagaaaaacaacagagcagtacctgacggagatgccagggtgaaaggaatatttctttaggtggaaataaacttgaataagtttgaatgaaatattgcttctaaaaatgctgagtgggaggtacaaatgacaggggagaagttgagctttttggagtgagaagggatgatcccagagggaggtctctgaaggatgcatgcagcagatgtattaagaatgtgggtggaggaatgatccttaatgggagagatgccgcattcattataatcacagataaaaaggaaagtattactaaaatcgcctttcaccacgacagagcctcctattctttaggagagggaaaacgagcttgagagaaaaaataactggaccagttagttgccaggacacctgagccctacttctaacttagctgtgtggtcctgggtaactcagttaactgctctgagcctcagctttcatgccaatagtggggcaataatatctgtggtctcaccttaatggggtagtttcatacaagatgctaggtgtaacacagctttgacattctgatccttactataccagtgtaaattaatttttatagtttgaatgctaatggctgaggatgacatctatttcatctctgttctgggtttcgctataggaacagcatccatcagtgtttccaggaaaaatcaccaattgggttacctgagtagcaagttcttgacagaaaagggagcacacaatttgaaccagttctatacagttttgaagtatttagcaaatactgctagaaagctgaggtaaaggggtagagcgaaaaaaaggaagggaaaaagatagtccatggaaaagaaagtagaagagcaaaatacaggaaaacacataacagtaagaacaaacaaggaatatttgggaaatgagagaaattaggattaggaggtasgtgggccttaacaaaaataaatagaatcaaattttctccttgtattgctatagtgcttcccaggaactgaatataacttatttaattgtaccaattgtacagttagcgcacattgtccttgaaaagagaacacttaagcttcccatagtcctgacagtgacgataatgacaatttcatctggttacatattaactagtatcaaaaacaagctcagtaggtggcataaccatattcaccctattagagggtgtactggctttgtctttgacgaagtatcttgggcaaaatctgcagtgaaggaaatatatatctacagagatgtactcagtgatcaaagagcagagtttttctcatttgtgctatcccactaacrtgtgtgtgtgtgtgtgtgtgtgtgtgtgtgtgtatttttttttttcagagacagggtcttgctctgttgcccaggctggagtacagtggttagatcatagctcagtgcagccttgaactcctaggctcaastgatcctcccatctcagcctcccaaatagctaagactacaggtgcactccaccacgccccgctaatttttttcttaagctttttatggagacagggtcctaccatgttgctcaggctagcctcaaagtcctgrcctcacgggatcttcctatctcggccccgcaaagtgttagggttacaggcatgaaccatcatacccggactttctgctttttaatgagaaaaaatatttgaatatacaaagataaaagcacatcctcaggttgttttcattctaatatgcytccatcatttctcaaaattatcaaaaagcactttgggagactgaggcaggtggatcatgaggtcaagagattgagaccatcctggccaacatggtgaaaccccgtctctacttaaactacaaaaattagctgggtgtggtggcgtgcgcctgtagtcccagctgcacgggagactgatgcacgagaatcgcttaaacccgggaggcagaggttgcagtgagccgagatcacgccactgcactccagcctggcaacagagcgagcctctgtctcgaaacaaacaaacaaaaaaacaaaaacaaaaagaaagaaagaaagcgttttatctttttaatcaggatacacttggtcctttaggtttctaaagaggactgatttccacacataatccattttattagatcctatgtttgctacagaggaattagtgtttggactaaaacaatttactacaaacaatagaattcaatggctgtcctaacatatttatactttggggcatgccgaagtatttttgtataatgaatctgtycccattgtgaatttgctatgtatatacatttcaaatttatagatactatctcatcaactttctaaaatgccaacttaccttctcactagcaatgcttatgtgtatatattttcccagcactcatttaaaattttaccaatctgatggggaggggagcatgatctattttgtcttttctttttcaagttcatgattactggtgatgttcagcatcattgtcacttgtaggaaccctgttgcttataatttatctttgtttaactttctttttgtttatactgtatctttattttctgattaagaaatccttctgcatatgcatactgaaattgtaaaaatattatcctgcattttttcctacattaagtatttgtgtttagattttaatcttcatctgcagtttattttggaataggaagcaaggtgggggaaatgttacaggattacttttcctttgatgaacagaaaataagygtatgcgtgtttgtgtgtgggtttgcacaaggttggttcatgacccttaaccataggagcccctttgttcactgtagtgctcatgttcgctgtggaactttccagtgtcagaactttcattttagagagttctacttagtttgggagcaaacactggggttaaattttaaaagtaggaaagataaagttgtttgccaactttacttaattactcagatgatgctgatgataatgaggctaacaacaatagctacaacagtaacaggtaatgacagctagcaattacgtagtacttactatataaatgggctaagacaagttctaagagatttagatgttccaatttttgttatgctaaaagattattttgctaatagttgaactgtcggtccctaaacccacaatttacagtaatattataaaaatttattaaaaagtaattatggaatatattgtataaggtattattgaaagttctcaagttttaaatagtgtagctttcataattcatttattttcaaagcaagttatacatacgtactctcattatttaatttaaagtaatgcagtataatttgaaggttaaattacaagttatttataaagaaaagggtataaaaaggcatggtatttaagatgtaagtatcaaactggtttttgactttggcagtaattataaataactatttattaattagacatcataatgtaattttttccatgtaattaaagaagtggtatagactgctaacatattttaacttttattagaaaataaaacatgttaatttttattagataaaataatttgaatatatcttgttactggtacaaatattttaggacataattttataaatgaattttaagtgaccttatttaatcttgtatatagtagttccccttatccgaggggcatatgttccaagatccccagtggacacctgaaaccacagatagtacctaaccctatatatactatgwtttttcctatacatacatactkaggatgaagtttaatttataaattaggcttagtaagagattaacaaaactgwtaatagaagaacaattataacaatatgccaacatcactactcttgagctttgggaccattattaagtaaaataaggattatttgaacataagccctgcagtattgagatagctactaagtgactggggtgggggttagggggaataacagcagcatatacagcatggatacgctggagaaaggaatgattcatatcccgggtgtcaagattttatcacaccactcagaatggcacacaattgaaaatttatgaatcgtttatttctggaattttccatttaatatttttggaccctggatgaccaagggtaactgaaaccacagaaagtgaagctgcagataagagagaacaaatatactatctttcttgcataaagcacatcagcaatactaattgactacatttctagtttcagtttcttccttgtttgtgaagcaattagagtattttcctagatcctttacattatcccttaaactttatagtaatttcctctatgcctaattcaatggctttttttttttcgcggaaaatgcaagatgagcctagaatatcttatcctaccaaacagaaaggatgctgccaaagactattagggttatgtcgaaaggactcagctgccgcccttaacccatttcctatttagaaaaaaaaagtgcagctccctgccagcattcatttaattttagtaaacacattctttgaggctggagcaaatctgactgattttcaatgtgaaaataaaatataaaagctgttcttggagttatttctaaacagaacttgtctctaatcctagtgtaacagacatgtatgtgatgttaccttaggatcagagacaagaggattctcggggcaaacgggaaattcattaagatgtttccacttgccaaagatgggataccattgatggtagccgctgctgccataatgttggctgcagtggagccggtgggagctccgtcccttctgagttggggccagagctccccggtgccgctgcagctgcccaaaccgaggctgcagaccgcggcctcctgctctatggagcaggtaggagccccgcccaaactgcggctgtggatctgagcctccctgtgctcttggaaggggctgggagcaggcaagatctacactccccgtgcggctgcagcaccccgaccagtggctgcagacctgggcctactgctccactgagccagagagagcccgggacaagcgggagacctgcccattcccagttggctgcgcgggagattccctggtgcagctgcggcaccctcacaggtgcasgtccaggcatctctgcagcctgcaccctcgagagccgggaagaccctccccttctctcgaccctgcaggctcaggggtgtctgctcccattgcctggcctttctcctctcccagagcctgctccaatcttggggctgagcccaggggccatgaatggcagcgggaggcaggcagactcctgggcagaagggggcaggtcccctgtaaggccccaccttcaggccagggaggacctgaaggttgggatcccggcagtcagtccctaggacttgtggtgcctcctttggcctgcctatggctgcccatggatcaatcagcaggcatttcctccaccccataaaagcctcgggctcaggcagagcaagagagaggatggagggacaggaagaccagttgcagagagaagctgccctctctgctaatagcaggagacratgggacaaccagctgcacagaggaactaccctctctgctgagagcttcagagacctgcagagacttcgggactacagtgcagagaggagcaaggagcacccgctccagggcctcctctctgctgagagcagtagatgttgggaagacctgcctacggagaggagctacccactgtgggtctcctctgagctgttctaaaatttagtaaagctcatcttcrtcttgtccttcacttgtctgggtacctcattcttattgtgcacccttcacttgttcgtgtacctcattcttcctgtcattcttcctggatgcaggacaagagcttgtcgccagccgcagaagtttctggccagaaaatcgacacctcaaagcactaggtaataccttgagtttaagaaatacagaaaatacaatcaacttaagctcattaaatatatttaaattcatgagttaatgatatatttttaatccaattgatcacattattttcaattgacgaaaaattatgtagacattgtgtgcaacatgtcattctgaaatattatacattgcagaatggcttcaatggcatttttaacgtattcctctccatggactctttccaaagacttttaatctaggttttagataaaaactgagttttaaaatagtgcgtgtatgtatattttttgtttgtttgtttgtttgttttttgagatggaatcttgctctaacgcccaggctggagtgcagtggcacaatcttggctcactgcaacctccacctcccgggttcaaatgattctcctgcctcagcctcccaagtagctgggacaacaggtgctcaccaccatgcctggctaatttttgtatttttagtagagacggggtttcaccatattgggcaggctggtctcaaactcctgagcttgtgatccacccacctcggcctcccaaagtgctgggattacaggcgtgagccactgtgcctggccatgtttatattttataagttcgtgtactttattcctcaaatttataattacartaatgcaactggcataacagaatataccacaatcatacagggtgagcatataactcaactgttaggagcaaaagtatgtagaaatattagagattattattaatcacagtatttaatattgtactagtttcattttctgaagtggagaatgttatttcatccggtgaatctcttaagacctagcatttttactataactcatttgaatgttatataaaatatattctcttgaaactttatttcaaaacagtaacaactttagatttcatatttaggacacaatgtgtatgaagcaacttttcaagtgacacaggactttttgagaggaaaacttgagtttgctgtttcttctgtggctcattttataaaccaagcgagagtcctggtagaggcttaatttttttcagaagaatgcctaacttacctgctgcccatctgatttctaaatatggaactttccgacatagcaattaagaatacagggactccaggtctttcagtgggctgctatctagcccccatccaaagcttgactaacagaggtgatgtgtataaaataccatactgctccaagcctagaagtttcttttaagtatgggtgctccctccctgttcttgtctccaccatggaatacaatggactgcaatctgactttcagctgatcactgcctgaaacttctgtgcatagttctctgcctgggattctgctcccaccagtgaggacgccttaattttttcttttactcacytgtccatttagtctgtatatcatcacgagacaatgctgaagtgtattagactttgctaaaagggttagagtaattaattacagaaaacattataacacaagagggaaaatacagagctatatggtaaatataccttgtcccgcggtctatgagtaaaagctctagayactacattctttctaggcggtctgtcatggacacactcagctcctaatctcagttccttgttctcaccttcttcctatccctttattaaagcacctcattcttctcttctctgctatctttccaacaaacttttgagaatgtctgtccagtcctcctaggaattgattcatctctccacagcagtacatttttgccgtctgggttkttctgtctagaataatgccagggaacggcctttggtaggacacccagtggtgggcttggttagctttctgaggaatatggactgtgctttaaattctgtggcagtccatggtgagtttaggagcttgaagcctggttccctcttaagttctcctcaccagtggttttggtgttttatcagcccttttttgggtcccctcatagcacaaaacccactcatagcacaaaaattcttataattggtaataatgcaattaaaatttccgattcctcctgccgattgcagctccttgaaccgttctctgcctcaccctaacttcctgcagctttcgccagtcattggccacttagtcctttgggggctgggcagcggctccgtgcactttggagtcgggggcgccttcctagagcccagcatccactggggctccgaagccgtagcctgtctgtgtcctccacccactttgtgccctcatcctcctctggggctatggcagcggcgatgccagcgtcctctgcaggtccgacaggctgctgacgggcaccaagatcaccacgcagaacatccacgaccacttggttcctacctggacaaggtgcgggctctggaggaggccgggtgagctgaaggtgaagatctgcgactgggccccggggccccggcaattacagccactacttcaagaccattgaagacctgcgggacaagattcttggtgtcaccattgagaactcccggattgtcttgcagattgacacccgccgcctggctgcagatcacttccgaaccaagtctgagatggagcagtctctgcgaaggagcttggaggcagacatcaaggcctgcgcagggcgcccgatgagctgaccccggccagggctgacctgaagacgcacatccaaggcctgcaggaggagctggatcacctggagaagaaccacaacgaggaaatcagtgctgcgggtggccaggtcagtgtggaggtggattctgctccaggcattggtcttgccaagatcccgggcaacacgtgaagccagtatgcggtcataactgagcagatgcccaagatgctgaagcctggtcaccagccagactgaggatctgagctgggaggtcgctggccacacggagcagctccagatgcacaagtccgagtcgcggaccggtggcgtaccctccggggtcttgagattgagctgcagtcgcagctcagcatgaaaaccgcattggaagaccgtactgcaggaacggaggcctgcgttgaggcccagctggtgcggatccaggctctgagcagcggtgccgaagtccagctgggcaatgtgtgtgctgactgccagaggaggcctgagcaggagatcactgccgaccgcatcctgctcgagcgccagaaagatccttacagcaacctgcccacctgcaaggtccgctgagtggcaggctcctgggcttctgctctccttcagagggaggatcctgggtaggggatgggaagggagggacccttactcctggctcttccccttacctgctaataaaattttatggcccaagggggtggggggaagaatgcaattaacttccaaaccagtttttcttacaccagttttctctggcagaagctggagtggggtgactgggtctgcgggtatttcatactcgctgttacatgtttttgaaatatgtgaaatctgttctctttgctatgtatttaggctctaactatgataaaaccagaccaccagagtactacacacctggactatactatcttgacttgtaatggggtttcatgaagtggcttgcttttgaatgttaccagctagccataacctctttctttctctctttctctttttctctttcttcatcaaaagatagtttcaagaaataaccatgtttattactcaaaacctacacaggcacatcgggcatatcctaggcacttaataacaatcggtattcattaaatgaagaactatattaaattaatttcttaatttggtgctaaatataaatttttattgaaggcattcattatcactagttgatgatacatttattatttcattcaatacatataaattctgttggtgactacataagtacaaataaatggtcattactatttgaggagagagatagagaagaaagtaccttgtaattttttaaattttttctaatctttctctgactataaaaagtaatgtatacttattataaaatatataagtatgaagaaaatataaagtaatgtgtgagctacccaccaaattcataaactgaaagtattttcagtattattgtatataataatatatatgaagatgcaggtatgggttttcctttttcccattttacccatttttttttcccgagacggagtttcactctgtcgcccaggctagagtgcagtggcgcgttctgctcactgcaaactccgcctcccgggttcaggagtagctgggactacaggcgcccgccaccacgcccggctactttttttgtatttttagtagagacgggatttcaccgtgttagccaggatggtctagatctcctgaccttgtgatccacccgcgtcggcctcccaaaatgctgggattacaggcgtgagccaccgcgcctggtgaaccatttttaaatgtacagtttagtagtgtaaagtatatacacattgttgtgagacagattttccgagcttttatatcttgcaaatctgaaactctataactactaaacaacctattaaacacttcccctttctcctcttctctgtccctggtaaccagcgttcttctttctgtttttatgaattggcttggatacttcatataggtgaaataatacagtatttgtcattttgtgactagcttattttacttagcaaaatttcttcaaagttcatccatgttgcagcatgtatcagaatttcatttctttttaaggctgaataatatttgattgtatgtattcattcttctattgatggacatttggctcgcttttacttcttggttattgggactagtgctatgactgtggtatataaatatctcttcaagaccatgttttcaattcttttggatatacacccataartaaaattcctggatcatatggtagttctatttgaattttttgaggaaacttgacggtgttttccatagcagttaaaccattttacaatcccaccaactgygcacaagggtttcaatttgtccccatccttgccaacacttgttactttctgttttttttttatagcagccatcctcacagatgtgaagtagtatgtcattgtgattttgatttgcatttctctggtgattagtaatgttgagcaccttttcaatgtttattagccatttgtatatattctttagagaaatatctattcaaatattttgcacactttaaaatctagttatttgatttttttttcattgtttagttgtgggagttctttatatattgtggataataacttctaaatatattctttgtaaatttttttttcccattttgtatgttgcccttcactcttttgattgtgtcctttgatgcacaaatgttttcaagtttgatgtagtcccatttatctttttttgcttttgttacctgtgcttttggtgtcatatctaagaagtcattgacaaaccccatgtcatgagattatcctgtctgttttcttctagaaatttcatagttttaggtcttatgcttatgtctttaatatattataagttaaattttgtagatagtgtaaaataaaggtttaactttcatttccattgttcccaacaccgtttgttgaggagactatcattttctcaatgagtggtcttggcacccttgttgaagatcatttgaccatatacacacaggcttatttctcggctctttattctattacgatggtttatttgtctgtctttatgccagtgccacactgctttgatcattgtgtctttgtatatgctttgaaatcaggaagtgtgagtctaatacctttattcttcttccaaagttgttttggctatttcagattcctcgagattccgtatgaatttggggatggattttctttttaaaagtgagagtttactatacattttggtcttccattatttaaattaaaatatatgttggggacagctttccatgttagtatatctctattaagaggtaatttgaataattacattttataattttatgtatattataatcaatccgatagtgatatttaatcagatttttgttattctagttatcacttcaatgagcatccttgtttttgaggtatagtctgtaaggtaagttactagaggtgaaaaagttagatcaaagggtaaacactaggatgtaaattccacaaaggataagatgttgttcattgctgtattcccagtgcctagaacagtacctagcaygcactgtgtacaggtgtttgataaatattcagttaatgatgaaagggtacatactatatakacgtttatatatttgtgttttatgtatgcttatataaatatcaatataatttatatacatatatagtttatatacatatatatacacatttctaaatttctaagatataactcttgagttgaatctcayaaaaaatgagaagatattttccaagcagactgtggcagacactgctcattggctaaactacccacaacatccctctctctaggcatcttcaaaccagagtgactatggtgctgtttgggcaatgagatataagtagaaaactgctgggtagggcttatgggaaacatttgctttcttaaaaagaagagttgtagtgggcatacccctgaatgtccttccttgttcttacttaatggaaaatagatgtgatatttaatatttcaatgaccatcttgagacagcaaagtaacaagcagggggatgaaggtctgcatgttaaggaagtctgaaagataaaatgggccttggtcctcatcagcattattgggcaattctatcaaccttggaacaccaacctatggactttcctatttgtttaagcagctgctagttgcttttctgttatttattgccagagggattccagctgatacaaaatattttcaagataggtcagtgtgataaacgacatgggttgtgaaacaacatacagtgttaagtcatctgcaagtacagaaaggaggtcaacttgactgtggcttagggattaggctaaagagagagagagtcagagccctgtgtgccatgtgaaagaatctggtttccattctgcaggcagttgtgtagataatgaagtgagttaggcatgagagaaacatgattactctggcatgaatatgacacacacattggagaagggcaatatagtcagcaggaagaccattcagggggctaattcagtgttcagttggaagaaaatgagggcccaaagtaagattacaacagtgggaagagtgagaaaaaatatggatttcaaatgtacgtgatgtgacctaataactactttaatatatatgggcacattggagagagaagttgtgttactgcaaattatcacatctgaagcaccattgaggtaaaggacacaattttctaataaagtatttaaagaaaaaatttccacctgattaatgattagatgtatatccaattatgaaacactactgatcacaaaacacatcttgatttcagagatgtgaaaagatgtgcctctttgaatgaatgaaaactggtatagctaaactaatatttatagatactgtatgccaggcattgtgataggcaccttgcttatttcacttagtgaactcaaaactttatgaaaaaggtgtgggtttttttttcattttagagataagtaaaggatgattgtagatttcctactagggcaagtgctgggtttgttgctaataacagatagggaaagtagacatattgaatttgaggttcttttgagatatccagtgaagctattcaagtagggagctgggcacagagttcagaagttaaagaaaaaagtgattaattgggttcagtcaatatttaaaggctgacaatgagccaagctcttgaattaggtactggggatgtgtggcaagtaaagcaatcaagtggagagatggatattatttagtcagttcacaagaattttaatgcrtattttgtatcagatactgttctgtggttaacaaaaaccacatgttcctgccattggggattatacattcctgtggaagaatacagatcaaagtatataaacaaataaattaaataaggtaattccatatgatgataaatgctgtgaaagaaaaaaatgtttcttttcttccctgaacatccagggagatccaacatagattgtgcattcagtcaagacctctcttatgatatggcatttaagctgggaatttatccttgcaaaaagggagagggcaagttatacagcattataggcagagggaagcatgtgctaaactccccagacagaaataaagtattcaagattagagagagggccaatgtgctgacacatcatcaccaaagaggggaaaagtatgaggcaagagaatcacggtgaaaatagcaatctgggagctacctatacacactattaaaagttgtagaaatgaatgaagaaaatgtagagtgcaaagaacaagcagcatagatctaaatctagaagaatctcaacatttagagatctgataaagaagaagatatccagaaactggtctgtggaggaggggcctcagaagaaaaacagaaaagtgttattttacagaaatcaaaggtagagattgtcctaggaagtatagattgttgggtttaatgctgctggcaagaagcctgctctcaatatcaaccttggtagaattggaaggaagtctacagaactcttctttccctggttagactttgcctgtcttggtctcaataactatcatggcagaattgcagaattgcacaagggactacagaacccayggtgttgtggagaagaatgccacttccaatctctccatcattccccacctcaagtgcttgactccggtctcaagatggaggctataatccagacctcttcgtaagagaaaatcaaactaatgcctatacacccatacatctctatttacttcggttgctacaagaaaaagacaccaggtgtcttttttcttttaaaaattttattttattgtggtaagaacatttaacatgagatctcccttttaacaaattgtaagtgtacaatatattattgtcgactataagtacaacattgtagagcaaatctccagagcttatttaccttgcttcactgaaattttatgtccattgattacaaactccccgttccctcttcagtttagcccctgataaccactgttttactctttgattctatgaatttggctgttttagataaatcatgtaagtggaatcatgcagtatttgtctttctgtgacttatttcactgagcataatgtcctcaagattcattagttttgtcgtatacagaattttcttctttttaaagaagttcgcccttcggtgctggaaaggcaactgttgggatcttcagaggctctgcagccaggggtggaggcagctggggaggtcctagccatgtaaccaaaccgccatcgctcctctcttcctctcttctgcctcttcctgtctagaaaataacttttttactctaatgaaagaaaaaagtagctgtctgcccctcacaccctttcttcctgtcagccctctgctctgtgaggaagccctgggggctgctcagctgctgaggcagcgcagccgagccccggcgttcccgggccgccccacctctgcctccttgcatcccttctaccccagagccaccaccagggtaggcgagatggccgcctccatgtccttcgtctccaagtttctccacagcaaagggctcacgaacgggcaacagctgcagaccttcagccacagcctgcaggaactgctgacagaacattataaacatcactgattcccagaaaagccatacaaaagatcaagttatctttgtattcgcatcaaccatgaaatggatcccctggacaggcagcacagtggattggaccgagcagtcaggagctgttcaagcttttcccaagtgaactcacactctgggttggactcacgctcacctcaacctatgagatgtctgtcctgcagaattggagaagatggctccatctgtgtgctgtatgaaagccccaccagcagggggtagcactcaaaacagcaccgacatacaaatggtagacagctgaataaactgtaaggacgaatttctcttgggcagaaccagcccttccaaaaactacagtatgatgactgtatcaggttaagatggatcatcttatagtgcatggataaatttgattttggctttgggtgggctcctattggggatggattatggaatttaaaccatgtcacagctgtgaagatccggcacaagatagagtggtaaacatttttttaaaagtgacagtgccatagtttgtacagtatctttcaataatttaatagcctatgagtccaagtaaatgatcactttatttgctagggagtgaagtcctagagtgatttcagcttctcccagacatacttaaatttttacatcaattcctttaaagaaaatccgtatgtcaaagaacctttctctgtagtagatctcgcagaggaatttgaactatcacacttgaaaattattgtttacctttttggcagctcaataggggagctcaacgttttaaacatagtagtactggaaattttacgacaagacttttacctagcaaatatttctaaatgtacataaagacaagctagcaaacatgacctgggaaaatggtcagactttgtattgtgtttttgaccttgaaagtagcaagtgaccagaatctgccatggcaacgggtttttaaaaagacccttagaaagactgtttcaactgtggtgttggcaccagccagctctacgtacatttgctagcttgtagttttctaagactgagtaaacttctattttagaaattggaggtctggtttgtaactttcctgggtaaaagtattttcatctattttgtgaactttgttaatcatmttttatttggtaaattatgaatgggtatacatttgtacagttcgtgtatattgattgtggcaaagttgtattgatttctatattttggatgagaaatttttcttctgtaataaattgtttcttatcttggcatttaaaaaaggcaatattccattgtgcatgtgtgtgtgcatatatgtgtgcatatatatatgcatgtatatataatatgcatatacatatatacaaatatagatgaatatatacaccatgtttccatagcagttgcaccattttgcattaacaccaacagtatacaaagattccagttttctccacatctttgccaaccacttgttgtcttttatttgataataggcatcctgacatgtgtgaagcgatatctcattgtggttttgatttgcatttccctgattagtggcattgagcattttttcatatacctattggccatttgtatgttttcttttgaaagatgtctactcagatccttgcccattttaaagtcatgttattagtttttttgctgttgagttgagttgtaggagttgcttatatgttttggatagcaaccccttgtcagacacatggtttgmaaatattttctaccattccatatgttgtcttttcactttgttgattattcctttgctttgcaagagctttccagtttgacatagttcaacttatttgtttttgttttcgttgtctgtgattttggtgtcatatccaagaaatcattgccaagaccaagatcataaagcatgtcttttattttttcttatatcagttttacagtttcaggccttacttttatgtctttaatccactttgagttaattcttgtgtatggtgtaagataaacatcaaattttattgttttgcttatggatatacagttttctccacaccatttgttgaagggactatccattccccctagtgtattcttggtacccttgtcaaagaccagttgaccttttatgggtgcatttattcctgagatctctattctgtcattgatgtttatctgtctttatgccagcaccatactgttttgattactgtggttttgtactaaattttgaaattaggaagtgtgagtcctccagctttcttcttctttctcaagattgattttgttatttgtggtgttttctcattccctataaattttaggatttccttttctatttttttaaacaataccaatgtgattttgacaggggttgcattgaatctatagattgcttttgatattatggttattttgacaatagtaaatcttccaatcaatgaacatggtatatatttttatttaattgtgtcttaatttctttcatcaatgtttttgtttccagacacaggtctttcacttccttggaaaagtttttccttaagtatttaattcttttttgtgctattgtaaatgggattgttgtcttaatttccttttcagagtttattgctagtgtatagaaatgcaactgatttttgtaagttgattttgtagcttgcaatcttactgtatttgtgtattagttttaacagttttttaaaatggagcctttgggatttttaatacataatataatggcatcagcaaacaggaaaaagtttatctcttcctttctgatttggtaggctttaatttatttttcttacctaactgttctggctagggctttggttctatattgaataaaagtggcaagagtgggcatcattgccttgctcctgttcttaaaggaaaagctttcaacttttcaccgttgagtctgatattatctatgggcctttcatatatagcctgtattatgttgagatactctcctatttatagtttcttgagagtttttaacatgaaagaatgttgaattttgtcaaatgctttctctgcttgtatttrtataattatgtgattttttttccctttattctgtgaatgtggtacaaatttatacatactgaaccatccttgcatcctgggaataaatactacttggtcatgatgtatgatccctttaatgtgctgttggattctatttcctaatatttttwaaatattttttgcatctatattcatcagagatattggcctgtcattttttttttcttgtagtgtccttgtctggctttggtagcagtgtgctactggccttataaaatgagtttggaagtgttctctcactttttggaagcatttgagactgattggcacttttttaaaaaaatgtgtattagaatctacctgtgaagctatctgatcctggrtttttatttgttagaaggatttttgttattcattaaatctccatactaatgataggtctgttcaaactttcttgatttttacttttgacatgttttgtgtatttgggaatttacacaattcttctaggttattcgattagttgacatatttgttcacttatgatcatttttatttctaaaagagcagttataatgtatcttctttcatttctttttttttagtctaaataagggtgtgttaattatttttttcaaaaaacccactgagcctctttgatttttttcttttcttgttttatttatttcttctctaatttttgttatttctttctctgctaattttgagcttagtttgttctttttctagcctcttgaagtataaatttgggttgattattttagatctttgttctttgttaatgtaggtatttatcacagtaaacctccttcttaatagtgcttttgctgaataccataattttagtgttttttatttttgttttcatttgtattaaggcactttaaattccttcttgattccttctttcactcaatgacttttcaagagtctgttgtttaatatctatgtattttttatttttccagtcttccttctgttattgatttatagtttaattttgttgtggccagaaagacacttggtgtgatttcaatctttctaaatttgttataacttattttgtgacttaatatgtgacttatcctggggaaggatctgagtgcacatgagaagagtatgtattcagctgctgtttggtggaatattctgcatatgtctgtttggtccatttggtctattgtgttattcaagtctgctgttttcttatggatacagatttctgtctgaatgatgtatccattattgcaaatagtattgaagtttcctactattattttattgctccctatttctcttttctgtttttccaatgtttgctttatatatttaggtgttctactgttggatgcatatataattgtaattgttatatattcctgttgaattgacccttttatcattataaaatttcccttttggtctcttgtaacagtttttaactcagtctattttatctgatataagtgtagccactcctcctgtaagagttaaagaaagaggaaagaaacatgaaaaatggctcaacagtgaaagacaggtttattttggagaataaacctgagaggggattctgaccaattttttggtcaggaccactctctcttacagactaagagtatttaagggttttagggtaagagagcttatcacaggcttggaatgtttctgtgtggaggagaagtttattgtggggttggaatgtctctggtcagaggggaggttatcttgggrctgcatctctctggccggagaggaggttatcttgggatgggcatgtctctggctggggaggggtttattttcgtgttggaatgtttctggtcagagatgtcatttgtggtttatggtcatgctgacattagccattaggctgatgccctttggggcagtttttgggtagttgtctgtgaaatggccatgatcctgtcagttaaaaatctctggaaaagattaattaggcagggtaagaacattagtcctaggcatagtagtaggggggggcccaggaatgggatgacccatgctatggtttttttcccaaatcaagaatccatttggttgttttggaattcccttagctctttggccctttctttaagttatttagcagtgtttcttactcggcccaattggttgagatagaagcaacattccttacctaatgagaggcagaggcacatgtttggaaagggccacgtgttattttctgccagtaaccgttattaaaaaataaatcatggtaggaatggtttgcattattatacttggtttaattatttgcatacagtgcagcaagaataattatttgttacctaggccttttaaactggcattgatggaattttgttccatagaaggaatctgagataaggccttttaaagctgagcccagtcatggaattgtaccattaaatacctatgagttgggtgaattcctctcytcctgaggttccaagataacttgggggtactggcctgtcagaaagtgacattctttacttaccacaggtcagaaaccctgtacagggactgtgcacataaaatatgaggccagtttcccgagagttttattggctccataagtcaagtttgattccttaaaggacrgcacacctctccagtcaaagccttggtaaaataaccagtttttcaaatcatgttctgttacaaaataaaacagattcttattgcactgatggaaataactatattgccataacttaaatatactcaaaaagtaaaaaagattacttcagtctctaggggaccaaaaacaagacaacaattgtttatggatgacaaaaagttttatagtagccataaagttacaattgacaagaatatctgttacctttgtggcatgcaatattttaacataacaattataattattactgataacgtacactaagatatatcagaaatataggagtctcttataactttggaacacataccaataacatatgtatgcaaatatagcccaaagaaagccaaacaccattttatatttgacaatgcttcctgtatgattttataccaaataagctaaacctttatattagtgtgctactaatgttaaactcaatttttaatagaaccttgtagatacatttacccgattttaatgtttgaccataaggtaagatttctatagaccctttttaaccctttataatttttgttaaagagcaggttagtgctttaagagaaaccaaacccactgtgcttttattttaatgtcagtttacagaaaaactggatgatacttcttcaactttagccaatatatttacacacagaatttcctttacaattaaccttccaaaacttgcttaaaccttcatttttattttattcaacttaaaacaattctttaaccttttaatctaggtaaaaatccacattctcatgcctccttataatctttttaccaaaagtatatgtaaactgttttttcaatagtcttaaatacatgttacactgttaacttttagcaacctttacttttgttggtaagtttkggattttaattatgtactaggtggagagcctaggacccagacagaagttcagataaggtccgacttattccagcatttaactccatgtgtcctaggtcttacctagctgcaaagcaggcaagttgtacagctaagagttatatggcattttataaagcattcaggagtcctaatcacttttaaattgtacaacatttcttgcataaattcccttttataaattttttcatgacttacatggacagtctctgacatgcctcgactttgttgtaaacatccctctctttaaacaactagttaatttacttcaggacaggaatttaccatatatgattcttttttgtataaattctcttttctttaatatcaaagatgataacagtcctttcccaaagcaaacttccttcatgtctgtgcactagactgcctaaggccacaaaattagaagttagggtatttcactaaatagttcaagatgaagctatctttattaaaccaatattaatgtttcatttattaaaaaattacacaagcaaagattattctgtttgggctgagttatagttttgtagtctctatgccaaattttgacacctaatagtatttggcagagataagtatgaaattgcttgattaataaatgcaaacaaaaatgtatgctggcaactcttaaaacatttctaattttactgtgccagtaagttttaaagattaaagtcacgtgaactgaaaggtcccatagcttttacttttcctctaaaaatatttgatttaagcacttatttttcttaggccagtcaattagagctttttaaatagacattgcacacctaacacatatatagccacacagacaaccagaagaaaatccagtagttataagattttttttctaattttccaattggattattggcctttgggtgaggccctttaagaacagggctaggaaaataatttccagggcctaataaacaagtaaagctgagagacaaagacagattttgagaggtacttatttacctctaattccaggggttccacaacgaaaacaaaggtttttccycaaatgggatttgtggcaacttttctgttttcccaaggaatcccaggccaccagragtcattttagggtctttaatacctgcaccaagagtggcaagaaagaatggagaaaagtaattcagttgactgggaaaaaaccttttccaggaaaacaagatttatgaagagaaaaacataaaggcctttgaatatactcatagcttggacatcgattttarttaagctgagtgctctttttcatcaggggtgagggttgaggttagaattatrtaaataatataccaagttaaattaaaggattgggttatgtgcaggaattccctgtgataatgagagggattttcagagaaagatccaaggtgctgtttaatctgtgacaaatcagacatggagaaagggacatgaacacaagcaataccttcgaccctagccacttcccagagtaggagaaaggcagaggtggtttgactggttgaagcagtttttgaatgagtaacaggtggagaaggaggaagagtggagtttggggctgagggttcggacaggcaagaagtggatccagggggatgaggatagagagggcattcatctgtagggtcaaaaggggtttcagaggaaggggtttagaaggaaggaatttcagaggaaggagaaacctggggagggttttattaagaaggatttcatgaggggtgcaagcttgacacagggagggtcaggatcttaggtagaagaaagcctgaatattcaggcaagaacctcctgccatttgctgttcctggttataaagttgtcaaggtccctgagaatttgaaaaatcaaaggtgccattttcgggccattagctgtcattatctaatttgcactggggcccggccacgttgcaataaaaagccamacactttggctttatgcttcccataagccaagtttggcaaggctgtgaaggagacagctcagtggagaggacataggaattttggattgttgagcacctatgtggactggtaagaagaagcctagggtgtctgtttttgttgtaggtgtccccagacaaaagacagagacccagaatcctctttctaaagagaacaattaagctgagaagaaactgggtgtccccaagatttcttctagcctagtcccactggtcctctgaggatcaggatggcatacctgactttcccgggtaccatgagaaagtcaggggaaggcagatcttaccagttggctggattagtgtccaatattggatgttccagttggaattggcaaagggcctcttgaaccagagccacatgaggaagagagagagagagagagagacagagagagacagagagaaaggaaagtgaggatgagggaggaggaggggacaagtgttagagagcaaaatacccactgtgggtggtcagaagtggtcaggtctcaggactctgagagcccactggagagtagccccagcctgagcctcacagttcccttcaggttagttgtcctgctcatgtaaatcacttgaaaagtgaagtaagaggcaagatggggtggttggccagagactctcaggatccagtgggatgagctgccrctgcccactgcttcctgggttgcaagagagcctctacccacaacacccgtcctgggttttggcaccaaatgtaagagttaaagaaagaggaaagaaacacgattagtggctcaacagtcaaagacaggtttattttggagaataaacctgagaggggcttctggccaattttagtcaggaccactctctcttacagactaagagtatttaagggttttagggtgagagagcttatcacaggcttggaatgtttctgtgtggaggagaagtttattgtggggttggaatgtctctggtcagagggaaagttatcttggggctgacatctctctggccggaggggaggttatcttggggcaggcatatctctggtcggggagggtttattttcgtgttggaatgtttctggtcagagatgtcatttgtggtttatggtcatgctgacgttagccattaggccaatgccctttggggcagtttttgattaaggggaactttaaaatgccagtgcttgtccaagatgatgatactcctgccctgtcacctactctcttgtgattaccatttgcatgggatatctttttcatcccttcactttcagcctatgtgtgttcttaaatctaaagtaagtaccttgtatatagaatatatttgggtctgtttttttaacttttcagtcactatatgtgttttcattgggaggtttactcaatttgcatttaaagtaattgttgataggggaagatttatttttgccatgttagttgttttatgttagccttgtaattattttgtctgtcttttcctctcttcctgtcttccttgtgttttattgtttttttgtgtaccaatatactttgatttttaaatctctgtcttttgtgtaacttttatagactttttggggttaccttggagtctacacaaaatatcttgtagttatagcagtctgttttaagctgataacaacttcagtttaatcacatacaaaaactttgccctttatcatctgtccctacacactttatttttgtgaaaattgatatctattttatgttttaaaacatattttagtttgttatttttaatacttttctcttttaacttttaactggaagtaaaagtgacttactagcattacagtaatacagtatcatgtgtttttctttatatttgcctttgccaatcagtttcataccttctcttgatattgtgttgctgtttagtgtccttttctttcagttgaaaaactctctttagcatttctggtaagacaaatctagaggtgatgaactccctcagctttcgtttgtctgagaaagtctttattactcctccatttttgatggacaggtttcccaggtatagtattcttggttagcaggtttgtattattttaccactgtgaataatttcactgccttctggactgcaaatttctgctgaaaaaccagctgatcatcttatcaggcatcttgtctatcttacaagtcactgttctcttattgctttgaaaattctcttttacttttgataatttaatgattatgtatttttatgtggatttcattgggttcatcttacttagttatttttgaacctggattccatttcctttttcaggttgagaaggttttagtcattatttctatgaataagttttttctttctttctctttctattctccttttctgactctcataatttgtataatggtcaatttgatggtgctacataagttccttaggttttctacactttttatttctttgtctttttttctcttctgactgaactacttccaatgactggtgttcaaattaactgatcttttcttctgctttatctagtttgctattgaactcttatagtgaatttttaagttactgtgttcttcagctcaatgatttctgcttggtaccttttgatactttttgtggttttgttgaaattctcactgctcatacattgttcttttgacttcagtgagcatctttatgagaattattttgaattctccataaagtaaatcacataattccatttcattagtgttaatttctagaatgtattttgttcctctttaaaggaatatctttgcctaattcttcattttctttgactctctgtgttgttgcctctgcattagacaaaggaaggcacctctcccattcttcacagactagtcttgtataggagaaggttcctatcaatcagccttgttggaggttgtgggagattctaacaatcctttctcttctcagggagaagcaggaagctgtggttcttgtctgcttgttttgtgatgagctaggggagttatagtgttcaccacttcaaatcaatgctgtctttctcccccaggcagccagtctgtgctggacccatcagaactacctgactggcaagataggtgccaattctttggtcagccacagagaagttggagtattggatgcaaagatcaactctttcttttcccaggcggaagttgagagctgggatttaaaaaaatccatttactgtctgctagcaaggggaaggattaatggcatctagaattccaagctgccacctcctttcttccaaggtggggctagactgtgcagactcatctgagctccccgactggcaaggcagatgtcagttgtttgggtatctacagaaaagttagggcattagacacatggatcaactctttctctccctaagggaaagctgagagcaggaaattttttgtccacacactctgctgaccagggagaaggatctatagtgcctaccagtccaacttgccatcttcattctccttcaagcagctagactgtgcttgtcctgtcagaactctatcactggcaagatagaaaccagttctctggggagaaccctcagaaaagttaagatgtgtgaagtaaccccttctctcccctaagagaagctgggagctagggggcctctttctaattgtattatgctatgctgggagtgttctgaatcttcttttttctgttttttagcctctcataagccgtagcatgtcctgaatcttactggcttcggtgagtctgcttttgcatttgtttaggatacaggagtctttcaattagcctttgaatttctcacaaagggaatttgtccatgattgttactaaactggtgttcatgtgtgggacagrggggaagcctgggggaagaccagggtttcctactctgtcatcttgctgacttcacttctccactcatgtatctttcatcagccagtttcttactgtgttatggctccactctggtatatccacccaccattcttctatgactccttgaacccttcaagctaagtcttctggaactcagaacctattattagcaaaatatcttatagccttctccaaatgttgcctttatgtatgaatttgaagcatgtcttcctattgagaccttgacttgttttatgtctccattaagaggtgaccagttttttttttctcccacactacatttatccctgtttctgtagataggataatgtcattcttgcctcttctcaaatacttgattttttttctctccataaaaggcattaactactctcatgccatttgattttaccatctgctatacctttgtttatttttaaatgatgtttaaaaattactttagaaattattttaagcagaaaaaattgtgtatatttaccatgtacaaygttttgaaatatatattcattgtagaatggttaagtcaagctaattaacatgtacattacttcatatagttgtcatatggttaaactctactccttagcatttttcaagaatacaatatggttaactgtagccaccatgtctctttctattaaaataatctataggatgcaggttactccccttttattctttgaagattttaacccttgagtcactgcatcctcaccactgttacttttatctttaaacttattaattttattatccatgtttgtagatggtttatctaaatccttcactctcatctctttatttttttaatccatataataatcttatcctaaaatgcactttaattatcaattctctagatattagtttttcctataacagcacttctcctcatctcaaacatctcttctgatgtctcttcttctaatcttctgacccttccagtccagttatattaccacgtttatattatctatcatccccttatgttctcaccttccacctttctcaactgaattttcattcaatttctttacctgcaacctccactctgctttcctactagaatgctaacctattagaatccaacctttgcaccaaaattaaacagaaagaatataactcatcatgtgaacatgttattaatgtctgatgaatgaatgatgcaacaagtgatagtttgaccagaagtacatatttattcagcaaatatttttagtgtctattttatagagacaaataactccattccttctaagtaaatgtataggacagagaatccaccaaaatatacagcctgtatggtcctcaaacatttccatgctctgtatctatggagaaaagaaaaacgtaaggaggttgtatcatttcctgaggagcattcagttgagtgtgggcagcagagtgagcttatgcagggtcaggaaactttgtgaaaggccagatggtaattattttaggtttatatgccatgtggtctgtcatgactaatcagcacacaaaggcagccatagccaatgttaataataagtgtggccatgtgccaataaagcttcatttacaaaattaagtgtaaggctagatttggttttaggtgtgtgattagttgaccattgtgttgaaggaagcccaattagctgtgaagtgaaatgtcgcttttagagatagctgtcctacaaataaacaaagcttattgacttttctgggagtgaatatctgaaattggagagtccgctacagaataggcatgctacgccacagttttgtcttggtgtgaggacatgccatgtggattgtctcagatgtaggaaaagccttgtagagaatttaaattgcaggggcccttggagagtgggttaatgccatctagyactggtcataagtggtgaactcttacctgtgctgcagggggcgatatactcagcaaccacagactcatctgaaagataacgttgggtgaaggaagaaacgaaagatctatgaactagggaccatgctaaatctgtctagtcactttactactggagaaaagcacgccctatcagaattgtcaraacttcatgtaaatagacaagaattaaacaggatcattaacatatttatattctctttccctgagactggagatggggactgaagcctgttcagatggcagctgttcaaattttaaattcttgggaagatgatcataattgcactaacctgtagttctctcttccatgacctctctgcttctattcactttgttcagcttgctcccttaattacttttcaaagattattgttccagcttgaaacactcctcctacttctatagacccccaaaactccactcatcctctaggatccaaatcagatctttcttcctgtttgttcttcctgagcaccagccttctgtgctgtttttgcctctcaaacttattgcttagctcactaacactcatttgtcactaatagtctttcctgttatgtaatatttttatctgtattatgttatctatgtctctaaactacttgaaagcagtgactatatattatcattctttttaattcttaagtttctgactcaagaaacactaattgataaatttgttcagtaagtttttgttttgttttgtgttgttttttcttttttttgagacggagtctcgcaccgtcacctgggctggagtgcaatggcrtgatctcagctcactgcaacctctgcctcccaggcttacacgattctcctgcctcagcctccatagtagctgggattacaggcacacaccaccacacccagctaattttttgtatttttagtagagatggggttttgctatgttggccagactgtagtaagtcgtttttatagtgtacatcttggaggaaagaaacaaaagattaatgttgactaagtgggctaagaagaggatcaactgtcacaacaggatccatttcttggctctggttaagattgtttcatttttctttcactcacctgtctcatagtaatcatagactttaacaattgctggcttcaagtctcctactgggwtgtcttgcagaaccatgaaggaaaaacttagcgtctgatttgtcacctgaaasgaaaagtgggagtaatcaagaacctagaaaacctccttctttctcccatgagcaaaacatattcttattgttctttgactctttttcaccrgtgtctttaggtgaccagacatttgtggatgtcaagatgggttttagaatgcatccttgggaactctatttamagtcaacaaattttcacagattttcttctaaacaactgagccaaccctattcttttgtagtcccttgttatgagattaactctctgggcccatgtgaatgtgttctaagctggagaaacatggtttcatacaatctgtaattaaaacaacgaagtattctttctgtttggatacataaaacattttctttgttttatggtcatatttgataatattcataaaatcctcattttattttatggtgacattttagaatgttaacattatcattaggcaaccactggggtcatatttattcattttgtggaggtggtctttaaaataacaggaatgcatgataacctttagtcctattgatttatcacttcaagtttaatatttattcatatcgtcagggagtggggcctttaaaacaacaggaatacatggtacaccttttttctattgattttgtactttaaatttcatagaaatattcatattccaattttaacacaattaaaaatagaacagaacactacatggagttcaaaggtttcccctcttattcttcttggaatagataaacctttctggaagggcattactaatgattgttttcctcatgttaccgactattctagtaaagagactcacttagaaagacgacccatatgtagtctcagccaggatgtcagagccctcacctgttccacataratgaggacatggttgttgctcacttctgtccggctcacagagctagatctttcaagctggagagaattagaaaacttcagttaaagttagagaacagatgtgagaatggtgtgagatctagagcagattgtaataagggacaaatggtcattctctgaagagaagaaagctaattgttttcaggtcaggagttccacaattcttcaatatccaagtaacacattagagcctctggcatctttgataattttagttcacgttgattttttttccttcccaaatttttagtgcatatcagtcagtttgggatttaaaccatatcctatctttcttgggtggttttattgttttgtgcccatgtgctttaaattcctgactaaactatgagtggcctaaggataggtactccttgtgcatttctctggtatcacatatgtcccttagcttacggccaactaaatagttcatttacttcctgggtttgggaaaaatatttttttgaggcaggatgatgttgacatggttttgatattggtatggtcttagtttggggatacagaacatacttttgtatgaagtctattaggattaaaatacacctaccatttttactgttggtttcaggggaataaaaccagataccatctttacatcaacaatcaccatattggaagcaggacggtttcctgtgtaactgtagtgtcaaaggaaaaagaatttagggttttatacgtgaaagaaagccaaatttctgctttcaagcatcactttaagcctgtctgtcttcaagaagttgtccctaatattctacaaaggtctgtgttccctggacttgtgcaacactgacattggacacatgcatatacatcagatctaccacttgctaaaattacagatgtttaagcatcaccccaaaactatcaaatcaaaatctttggtagtgaatcttgctaattggcatttttaacatatctatggtttttgcacacctcactatacagttcatttgttatttagtatatattacttttatatttttagtagagaaaggatcacgtcataatgataaaagcctaaattcatttatagatatatcaattctaaattatattaatctaataacatagcttccaaatggactattaatttctgttaattccaagttgcttttgggccaaagataggtgattaggttagaacgtcttacctgatggtcagtgagatctgaaagctggtgtgggctttgtgtccatcgcaagtytggggcacagtctgcacttttaaagcaaatggggagtcctctttctctggaagaatattgtatttcatggatgtctgtgaaacagcaaagacactatcagtttctctctttttctggacccctcacttcctcattacttaacgtctccagaggtgccttttactttcccaggaaggaaggaacagagtttccatttcaattggcaagtttaaagttgaytctcacccatataagcttggagccctacctgaagatacacacatctttccccagttactgttatgacatattctccagggagctctggcaatgagatctgctgcagtaataggaggttgttgttgtctacttggaaatttgtagaaaaggtctgtgaatcctgaacggtgacctgtgcagttttctcagttctggtgaaagtggctgctccatacctggacagggcatggagagccaccactgtgtcctggaagagacgagtggacaaccgccccaaagagtaaatttttggcrtctgggattttcccccaaagtctgtgttagcctaccatgagggaagctggctttttacccctaaggtagatcttcactaattacctttcctttttctctgcctttcagacattatcaaaatcatgctgcagtttctccaaatgaaataaaaggctaataatgtttattaatgtcactgtttattttcattgacagtccttttggatatgtccttcaaagaataggtctaaaactaagaagttaagacaaaaatagtgaccatttttaagtagatgattgaccagttagatggaagagtgataaaaatttactgtacatgaaaatggtatgagacaagttgcactttcttgagtttctttttaccttcatctagcttgtttttatttaccccacctaatctctctgaaaaacaaaagtttcactatggagatcctaactgttgaaagaagacatgtaggagggaaaagccagacactctgggtgtttaatacaatcatttatactctcgataaaatacttttagaattatgctagaaaaatacattttcaagagcttcagcttaaaaaagatcaacttaaagagaaagtaagaagagcactctcagggaaagtagaaaggaatgaagaagctgagttccttggagtagttgaaatggaacttctcattccaaaaagatcaaagtggattctacttagtcactgtacttttaatcacacattttttggggaatacatcttagaggatttcttgttagattctgaagatgtctggaacattggttcccaactggaggaaattttttcttgtttcaactggaagtgacgtgctactggcatctaatggggagaggccagggatactattgaatattttataaggctgaggatagttccttttacaacgatgatgtggctcgaaatgtcaatagtgttgatgctgaaaaactctggtctagaatgtgtccaatgaccatagcgtggctttagagggtaaagatgctcgttgtamgtctccatgttgctaatatattaacatagggcttagtgaaaagtgttatgggggatgtcttaagtctttcctttaaattctcatggtcctcaaatattcctaaatacttcttcaatgatttaataattgccttctcttttccattaactgttctacttttaagcctcccaattgccaagtgaacctggagcagaagactctttgggaaccactgacctgggtggaggagaaaccaccttgggcgttctgctgcttcatgatccacttcacaatgttagttgcagaggtcaggtcccctgaggtgggggctggctgggccgtgagataagcgaggagcacataggatgtcatctccacctcagcagagggagcctgggkttggtaaagatgccccactggtgccttgggtctctgagggcgctcccaatggacgaggttgtcttaagggtgagaaaaaggagataattgtaactcatcaataagtaattataactggtagataagagaatgcacattcataatacatggagctgaaaataatacaggagaagcaaggtcttctatgtcataaactcctaaaactcactaactcacacttctatgctgaacttgatttagtcctgtggtacgaaggtagggtaggttgatggaggaagaagcatagagcatactcaccaatctctccaatgttattttagttggactgatgaaagagaaaagtggtagagagagttcttttattgttcgtgatattttctgagaattgcagtatagactagaatataaaacttaactattgacctcatgtgacttttgtgatgctctctctggcaaatagagataaaaatagtttgaaaatgttattgcattttctgtttgttgtacctcttttctttctttttttttctctccaactgaatcagtccstttttgttgttttgtaacctcttccagagttaactacttccattgtaggtgatgaaatgtataaggcaccacttcaaatgttggcactgctataagcatgttctttcctgctaattcaactcagaattaaaacttttgattcttgttttgttttttgttgttgttattgttgttgttgttgttgtttttgtactccatactcagaaatagtttccactgtagaagttatctcatggcagttgtgttctttctagtagtggtctacaaccagactctagtttctccaagaacactacaagatagattgagtttaaatatgtactaaactaaatgacactctttcaaatgagtttgaatgcattttgtttttagacaacctctatgacattttttccttaaaaacaatgcctctgctccaaataaatcatggtcaaaataaatgaagatctcaagatgacatcagttctacttgtctaagtcctggtgttgtatggatgacaagcagaagccagttatgacaggtgatacatccaaagtaactgccaaatttgttaacatttttccatttctaaaccatggaaaatcatctatggagtcacaccatcctcatggtagtccagcagaggcaccatgccatatgggttcatgttttcaccaataaagaactggtagtttttattgcttcttgaccttttggctaagatcaaatgaagaactggtagtttctgagattagaaagagtgtgcttgatttgttctgcagctcctgttataaaaggttttactgtttctggtctctgttctttaagtttgtctttgattttatgtcagctttgatgtacttcttgtaggcttcttttgtgaagtcagttcctgcaagtgattgttcatgacaatatcaacaccaatgattactctgcttccagtaccttcgctttgggaaacttcagtgaaggcatctccaccaataagcgagtcatcaatgtcaccctttgtcctactgaccatcttcccctccacctccaggcacagtccttcctccatctctggatcttgtaaatgtcagagaacatctcagcgtggctgatgagatcctggtagataattatgatggtagctgaaaggagactatagcagcactagcttaggagaagcccagagcatgaagtgagcatggtgcagccaggacggcattgggtgggaatttagggggtatggaagagctgttgtacctcttttcattcaagtaagtagagagaaatcatgagaaaatgaatctatttgtctattatattggttttagcaagtagaaataaaactgcattatttatctgcagcattatgtctattatgttctgctctgtgtaacatatgcaatcccagagaagacagttttataagaggtgctctgatctcacaatgtatgacttggctaaggaattacagatgaagcttgtggatttcagaaggaatatatttcttctttttgtagaatcagtgtaaatggaaatggaaatttggtaccatttgctgtttgctctcacctttttttgcacagtttttaaaaaaacttttattatttatctatttatttatttattttttaaatkttattttattttaagttctggggtacatgtgcagratgtgcaggtttgttacataggtgtgccatggtggtttgctgcatgtatcagcccatcacctggttattaggtcccccatgcattagctatctatcctgatgctctccctctccgcacctcccagacaggccccaatgtgtgctgttcccctccctgtgtctatgtgttctcattgttcagctcccacttataagtgctctcaccttctttcacagcttccttatcaagtgagttcagtatttctctattctgattttgctttcccagtagggaaaaagcataggccagcaatgccttggtgtagacatggctcccatgrgtcccctcctttgctacattccaggctgactccaggcagaacagggcattgcgaacaatagggttctgtaaaggcaaaatgtggttgtgtcaaactagggtgaatagarggcagagcaagccgagagctggatattgacagtcagatgttattaatagatttcagacagataggcagacagctagatattcatcatatttaaatagaaaaatatttcgatctcttccctttatagttcagtcttaaagaataagactagagaacstgtttttaggattggttttgatacatagtctatgggcattactgggcaagtgtaaatctctcttaatgcatcaaccaaagagcttatcagtctgagaaatccctcatcattgaaccaaaagatacttgagactcaacccttagcagggtggcattccagacagcaaatctacagttttcatggtagggaatgggattgagctggtacctacagtgactgggagaggaatttccagaagggcaatagtaacataggcggagagggtcgcttcatcttctacacctccctgtgaatacaacattgatttgattaattccagtgccaagtgttagtatattctcttctgttgtttgatggaaacgctcctcagtatctgtttccattcaaagtataccatttccttctctctctctytctcgacagggtcttgctctgtagctcaggctggagtgcagtagcactatcacacatgacagcctcaagctcctaggctcaagcaattttgctgcctcagcttgtcaagtagctgcaactacaggcacaggccaccatgcctggctaattttgtaaaatgttttttgtagagactgggtcttgctatgttgcccaggctagtcttatactcctgggctcaagtgatccacctgccttggcctcccaaagtgctgtgattctacgtgtgatccactgcatctggcccaatttcttccttctctgtagaaagtgtaatactctttccctgatgccatcccacatcatccaggacttcatctttgcaatttccttgtgcctccttcctcccttcacycctgggggatgttatgttgatgtgtgtcaggctcagaagtttgtggaacagttcacctttatggcrttgttgagcagtgacccagagctcctgaaacagccattgtccttctgcatctgggagagccacgtgagagattgggtaatgtgtgcttcatcaatgaagatgtaggatcgagcctgggcgaaagtcttcagtacaaaagctgtgagcctagggggaggaaaaatgcagtgctgaggctcttttcattgagcactttactgctctgttttgtacacacaggctcccscatcacagtgtgcmcccaagaaagtcaatyagctgttactgagagtttggagactttttctttttagcttagacatctctttttcttttttcttttcttttytttttttttttttttttgctgccacatgttgttcaattcattaccagcttgtccttgcttcctaaagcatttytatgccacttcagaggttcaggttccttccagttttyttggttggttaactaagtcatttgcttttacactgtgggctytatgaatttatttcctttcctagatttcttagcttactttctgtagttttaactctaatcagctaacttctaatgttctgcttcagtaaatatttccctccatcatcctgcccttccacttttttcccctgtgtttgcctgtgtggtaaaactacaaagagagagagagaaaggatatcatctagtagaaggtagtaaggtatgctctgccagtaatggttgtggttttattctagcatttttctaacacctcttagggctgagcaacaatttaagggggcaagttacaaacctataatgttcccttagcaacatgagaaggaagagggtctgggtatattggattaaaaaaatcaacctaaaagtgttctcaattttgccacttattagatgtttgctcctgacacatttatttatccacactgaatatgttttctcctctgtaaaatgaagctaataactctcacttcccagggtagctataagaattaaataaggtaacattatggtttagaaatkgtttctccaccaaaactcatgttaaaacttaatccccaatgtggtagtattgagaggtggagcctttaagaggtgattggctcatgagggttctgctctcatgaatggatgaatctattcctagattaaagggctatcatgacagttggactggtggcttcataagaagaggaggagatgctagcccagtctctacaaagtaaaacaaagaaaagaaaagaagagaaggagagacccaagtgagcccattcaatcctctagtcatatgatgccctgcatcaccgtgggactcctcagagtccacaccagcaagaagactctcaactagatgcggcccctagacttttgacttatcagccttcatagctataagaaataaatttcttttctttataaattacctagtttcaggtattctgttataagcaacagaaaatggactaagacaggtaatctatgtgcacgttctgaactcatagttgaaactcagaatagattttctttcttaccaagtgttgccctggttcctgccatatcgttccccaaaggtgctgtaggagccatcttggtgtttgtagttcagctgtctctggtaacctgaaatggaaggcttcagattgttcatgaagcattaaagaaaggcaggccatccatatgtttaggctcatgcatccaggcgccatggacattttatgaccttctgtgatctgccatagttttgtgaatgttatggatagatcaaacacaacatcctattagagtgtgggaagattgttgttttcataaaaattatcatcatgggttaatatttgatgatataactgaagcttaattgggaaaagtttcaytagagtaacaaagtaaatttttctctgtctcacttaccagtgatgagatagccaacggccttggccttgatctcctgcrtcagctgctgggtttcattcagatagttcaagacatagatgttaggagcaaataggaccatgttctgttctccacagccatatggcatctggaggagattttgtatattttgcatagcagaacctaatatgtcacctggggaatgtgaaagattagatgtcagaataatttcagttcataaatagccaacattattaacaaaaatggcctttatattcagagtctatcatttaggtaagagaaaagttatatacacagagtgtgacttccagaatcctaataagaatagcagctatcgcctgtaatcccagcactttgggaggccgaggcgggcggatcatgaggtcaggatrtcgagaccatcctggtgaacacggtgaaaccccgtctctactaaaaatacaaaaaaattagccgggcgtggtrgygggcrcctgtagtcccagctactcgggaggctgaggcaggagaatggcgtgaacccrggaggcggagcttgcagtgagccgagatcacgtcactgtactccagcctgggcgacagagcgagactccatctcaaaaaaawaaaaaagaatagcagctatcaagaacttgataattcaaatacaaatacgtagataagatgtacagtggcaactcttttggcccaggtttactaaatggaaggtgactcacccagaactgagaaagaagctctggcagattctttgaccacatttgatgggagcttcaaggacaactgctcagacacattagcacctttagaaacagacagcccatgttaaaggaggacatctatgattacaatataatttagtgattataatgtagtgagagcttcagagccacactccctggatatggtactggccctgctttgtgaccttgggtaaattgtgatgatttgaggaaaaaacacatgtaaaacattcagaacagtatctgcaacatattcaatttcaacgaatgtgagcaattgttattattgcagttattttattattagagttagcagtaatattattatatctccttgtggaactctgggtgcaaggaataagaatttgacttaatgatgagactacctttgatagtctaattgcttttggcactgtgtgacttccagagtccttcctcttctcatttaactatatttttgcatggctgtgctcagtagctttctaaaagaagcctaagacttagtgggggaactatcgctctccacttttgtagcaatattaagacttataaccrtgataatacaagttattttactgcctcccttacactatatttgaatggattcccatgtttataaatagataacatgaatataccttaaattagtccttctcaaatgacaaatacagtgctgtatacactgtggacatagaactaataatgtggcggttctgtataaaagctacaactacttcttaatgatatgatgaacttaaatgtaaattattttctacacggaaaacacacatttttagtgagatgggtaggaaatgctatatgttttgtcagcagctgttttagagactatctcttgggattcaaacttatcatgaccctgctgtctttagtttttgttgttgttgttgtttgcttgtttgtttttttaagagtctcactctgttgcccaggttggagcgcagtggtgtgatttcggctcactgcaacctccccctgcccggctcaagcgattctcgtgccccagccccccatgtagctgggactacaggygcccgccaccaggcctggctaatttttgtttttttcgtagagacagggtttcaccatgttggccaggctgttctcaaacccctgacctcaagtcatcctcccgcctcagcctcccaaaatgctgggattacaaatgtgagccaccacacccggccaaccctgctctctttctacctcatcctgggacactctaagcttctgcagctgggcttgtcagtgagcagccactgggctatccaggtaaaagggctacgtatgaaccaagaaagcccaggtattagtcctgtctgtaccacctgagtcacattaacttgctctcttgggctcaatgtcttcatctgtaaaacatacataaagaaatatttagtattatgctgactttcatggaacactctgaaaactgggagataaaatgaatgtgcattgtaacttgaggtttatacccctttgtggttttgatctcactatgattatgaagatggactcttacctgaggcacaggtcatrgaactgaaagtcttttcttgctcaataccttcagccttggatgaaaggaaagaaaaggagaaaagatagaaacatcctggtgacaagagaaccacatggattcctttctttgatgggtagggtttacacgaatgatgtttaccatcctactctttttttcccaacttttgttttaagttcaaggggacatgtgcaggaggtgcaggtttgttacataggtaaatgtgtgccatggtggtttgctgcacagatcatcccatcacctagggattaagcccagcatccactagctattmttcctgatgctctcccttctgtcactcccactctcagacaggccccatatatgttgctcgcctccatgtgtctatgtgtttgcatcattcagctcccacttataagtgagaacataacatcctacttgttattgaattattacaaatccataaaacattgaagaaccagggagggtggtagagagaaaatgggaagagataataagggcagtaaatcaaagctaatgggtatgagagatatgtgaatcttaggagagaggtggagatcaagaaattgcgctcaatgtaatcccagcactttgggaggccgagaagggaggatcacgaggtcaggagattgagaccatcctggctaacatggtgaaaccccgtctctactaaaaatacaaaaaaaaaaaaaaaaattagccaggcgcctgtagtcccagctactcgggaggctgaggcaggagaatggcatgaacccgggaggcagagctttcagtgagccgagatcgcaccactgcacttcagcctgtgcaacagagcaaaactccgtctcaaaaaaaaaaaaggaaattgcactcaaataatttgtgaaaaaaaatttacaatagctggcaatgttgtctgctgcaatgcttttagggcaggaaattccattagtcttacaggatgtattgtgtgagcatgatattaatggttctttgttgtctcaagagtgaccgcccggtgttgcattcttacagktgttagggactcccaaaaatatgttacctccaccaacagggttttgatgactgtgtcttttcttttaatctcagggacctcaacaacctcatttccacagagttctaaggactgcattgcctctgcactcactgagaagttcacattccctaaaacaaggaatattgaaaacatgagtatccactttgatagtccaatcacctttaagggctgcaccttaaacttatagttgtccagaatagaaaataaggctaaaaaaaaagaaacccacaaggttaatgtatactaagtagccaatgtccaagatagtgattctggggactagcttgggtgagaacagtgggaggaggtcatagtggatagaaataggaaaaaaaactaactttatagaattatatctatggcaaataaaagagagaatatgatgaaaaaagtactcagacagccaccgtccttgttgattgataggcccttttgggtactgtcactcacccagagttttaggagtcactgtccaagacaaggtttgtctctcayttccacagatacaataggattcttctccctttgtattttgggaagctaggaaggctggagaggctttcagctgcacactgacctatcaccccatgtgaggcagagacagaaatgatcagaatatggaacgacaygaacacatagaattggggccaagtgtragatgctgcagtaaattgggatttgkaagaaaaatgtatgtcacatagattcatccatgctttaagaagcatggcaatggcaatgatacaaatcaagattggttgtgtattaggaggatttggcatttgccttagggtagcttgtggacgtgcaggcttggcagtggcagaggaaagggaaaagcagtgattgtatattgccctagggaatactatctgctgctatgtagattttcatagtttcttccttcctttcttctcctatttcttacaacatatattacatgtctaatccatacaagacataaaacactgggaatggtagatgagaggctcccgatcttgaggatattgtgtcacaagaaagatgatctatatacaaccactattacataatttacaaagagataagtgctataagataaattaaaattatatattttggagatttcaagatgacgggttggakaatgactctcgtggaactgagaaagctgagttgtgtgtcagcttcaagaatgttcctggcatataacctaacttgcagcaaagaattctgcaagcgctaagaaatagaaaagcaaggtgtggcttagagagccgtgatttaagcacccatagcacatatatcattgtattatctttctgatcatgtcctgctttgcatagcactaattattcacagtgctaacacacaatcccttgaattatccttagtctcaggaacagaatcagtagctgactgatcaaaggaatcttttgttctacccacctttcctgttcaccctcattttccttacccggatgcatttgggaaggtagtttaggaccgtggccttgagtgtgaagrcctctccacgaatcacagagtaaggcattgtgagctccacaaagaagggctggaaggctcggagagaggcagtggaagagataccaagtccagcatcttcrgacaggcagaaggcccctgccttccactcggtgatggtgtcagggactgttactcctacctcagccacacctgatgagctggggrggagggcaagtgaagaacagaaataatgaatgtaagccaccttttctcaagtgagaattaatatgcataaagctaacgtcaagaactgaatccacttaagggtatatgcgagtgtgcattcgtgtgaacactagattatgtcctgggatctgagttgggaaaatgaaagccactgaatggtacctctcccccttatcaacaaatgatcatatcccacatgtctgtactttgaataaaaatatttgaattgcgattcattttagtccttaacttcccttgctattgtataatcccataaataagcatttttaagaatcatgaccaacaattagaccactggattaatgtagcctgatttgtttatgtgcctgctccagccctgatatttacagaaggctccctgaacgacattaagcagtatatatagaactgaatatttatagttctcatgtctactatttgacagtatcagaaataattattttagaattgctcagcactgagacaattgtattaatgagcctatgcaattgcgcattttacttaggtctatcctaaagaggaagaggttaagataattattcagaacttttcaggaagattgtcttagaawtgaaaatgttggaggaaccacattccctcccctccagcaaatggaggaaagtaaagttacttacttcactgccaccaactcccagatccaagtctcaggaaaatagcttcgcaccgtttcagggactggccctgaactttgttcattatttaagggtatcacattatatgtgcctaattgaggaacatatggtctctctactactcctagacctgctaaagtaagagaaaattgtctagttagggaaaaacattcattaatttcatggtgcacatgtgagacgttagagaacaaaattttcagttttcctgctcagactgtcctaaaagtcttgtagaagttgtagaacttgggaaatactttgtgatccctcattccctgaaaagagaggagtctttgtcaaaggtggaaattctatgtatcctagacatagcataatttgatgtgaatggaagctggaaaaaygagatcacttggagacagttttatgggttttgtggcgaaggaccaattttgaaattgagacagtattgcttcattcttagagaaactgagcaggaattgtaaaatgctctttagacattgagagtggttgctatactaaaaatgaaattaccagtggagtgaacagaatttaatgatttacattaaattacttttacataaattaaatttactttaaatyactgtatggaactttgcaaaactgttgttctctgggaaataagattagagcattagattttattccacttattttttgacatctgaaataaacaattcagttgtcaaaaacagatatttccatttggaatggctgtgtggttcagacaaagaaatcatttaccaacgtgagagggtggagagctagacatgaaagcaattttgtccacgttgtgcctgaaatcatgcttactaattgaatttgatttaagatctccctccatgtatcccatctgatatttcagaaataccttgtgaaagaatacttacaaggaaaaatatatttctagcaatttcaccctaacagttttctccactgaagaaagcatcagtagtaatttctttagtgaatatcatacaccttgccccatgtccttccaagtggtaacaatttctatctctgactctgatttctcactgttttgtcttctctgtcttcactcttatcttaaatattgaaatatctaaaaggatgatgcacctaaatgaactattttccattttctactggatatgtcaagggccctccaactcctccagttattgcagttaacaaaccatggcattatgtgttatttcaactccatttagtggaccatggctatatccttcctactcttactgtcaacttgactttccacgtgtcctttcatagtctctgcatcaaagctttgtgtatcagacccaagaccctggtggcatgggctcacaagggtatctcctgatccatgggttgcagagatccttgggagaaatgtgatttcccaggcgaggtcgcacaatcactcaccgcttcccttggctgggggtgggggttccttccgttgccctcccccacctccacccctgctgcttttcattgttctctgtagtcatggaaatggcttcatgttgttgaagttcttatcaagaaatttcacaagatatttcagttttcttagctcttttatttcctcatatacctgattcatttatagctactaatttcaatccctgttatgtattcatcacacattttagaagctctttttttcctgagtgttattatatgccgtcaattttccatcttgaatttaataaattcaagaacatttccttccccccaaacctcaatggtttaaacttgaagtttgttctatgtaaatctcatggctattttcctttcccttattctttattctcgttatttatataacatctcagttacaagacaaaatcatatttaccatttttgagaaattgtttgaaatttgtgctatcattgaaggtatacttaaacagtccatggccctttaaaaggtgtcattttcttaataataaagctcatttaaagatggatattaatcttaaatgccaaggaacatagaaaatgctatttaaacaatcaaagttcttaatttgtgttggtgcattatatttagttatcttattgggcgttttgcaaggtcttgaagagccattagtcaaattccttcaatttattaatgaaggatttgaggcttagagaggagatatgacacacccacttcacatataggatatctgatttccaatccgagcatataaatatttgtgagcagatggatgtcaggaatattttggagaaaaagggagttggattcatgagagagggatgacaaatggctgggtagtgttcaagtgtaagtagacctggtgatgggacagatgttttaataagttcaagggtgttgaaaaaggctgctgtatttgaatagtggttttggccatggattatgagatatttctgtgatgttcacgttgtttcttgtcaccagtgaagccctttgtccttctttakgttttttaaaatacagcatccctatgaatgtctttcctgtttccataatcagaattactctttctttccattgtcagcattttccctctcttacagtacatcagaatcttgtattttatctgattttgtgccctgaagtatyggatgtatctaaaaaaaaatctctgatcagttctagctatcaccagctaagtcacctcagcaagaaacaattaatttgaatcttggtttctttgtgtgtataaagtggaaatagggctacattacctcattttagcattttgggcatagtaatattgttggacatgaaataaaattaaaagcaaattgctgttttacctccatagtayccttgacctactgctcctgcagacanggaagggatgactgaacacgactttggttttcggatttttgagttagtgaacaccttcaatcccatcccctggaaaaaaataattgttcaatctacttgtaagcttgattagaatatataaaacatattatccttagagacttctctatgtaattccagtatccttatattaattctatggcgaaacacttgacagtaaatatagagtagtgaaattactaaacttatggattattaagattttattctttattcattattttttggtttgcaaawaaaaaaacctaaatataactaaaaagtatccagatgaataggcagaggttagatctagccctgactcacatactgagcttttgtgtgatcctyacaagagactttaacctttttattggcttcatttttstctgctgaaaaatggagaggcaaggctacataattactaagattatgaatagatacagagttttattaacattcaaaaactcacaagccagcatgttaataagtagtgagaattttaccttgaggaagctataaatatctgcttcattacttgataagggaacatagatggctccattatgaatgaagaaaggacggggacagtgtccttgttcttcctcctgctggtccacattgtcaggaaaattggtgagatccttcacagttagcagattatatacctgtagcagtggggggatcaaaggcagaactgttacttacttttcttttgaaatagaatgaactgagagaaataaaataattatcaccaatcttttcttgagtacgttcatgtagttggtaccttagagatagttgaagattttccttatatttaacagtgttgttttgttataaagaaatgaaacctacttgggaaaatgcttccaaagattaacaaaatcttaarttatgaaggattaattaaaacttcattgtagagtctagaggtaaaaatagaccaaatatagaaagamgacgtaacttgcatctgtgtttaattaatacataatgccctgaggaatttagctacatattattattgccacctgttaaacatctatgtctactcaggcttattctcagacagaaaatcgtatagatggcccattagaagcagctgcggtctgcagcacttacggagtggaatgaaaaagcttattaaatgcagcaccttcaactgaaatacccaggttctcacattgagactgactaggcaagcaacttgagccacagagaacaatgaaaagcagcaggggcggaggtgggggagggcaacggaaggaacccccacccccagccaagggaagcggtgagtgattgtgcgacctcgcctgggaaatcacatttctcccaaggatctctgcaacccatggatcaggagatacccttgtgagcccatgccaccagggtcttgggtctgatacacaaagctatgtggagtcttggcagagcagcwgctcaggcacacagaaaccctggagttttacataatccggccctgggatccctggaaaggcaggaaatctgtttgtatatatccctaggaagggggctaaattcagagagccaaagagcatcatcctgtggaccccacttccacagcacctcacaggttaagactcactgtcttggaatctcagccagccgacggcagtgggttggagtccacctgagatggacctgagttcctgcagggagaggtgggtgccatctctgtggttctgaggactcagccactccagcctgaaggcttggggaatacagatggtctggatgaggaacggtcccccacgatgcagcacagctgccttgccagattgtgatcagactgcttctttaagtgggaccctgatccattcctcctcatcgagtgggacctttctgtgggggcttcaggtactccagccagggttctaaagacagagctttgatctctccctgggacygagctcctggggggcaggggtgtctgccatctctgcagtttggttgactctgccactccaacctgctggctttggagaatacaggtgatccaggtgaggaaggatcccacccaatgcagcccacctgctctaccaaaaagcagccaggctgcttctttgagaaggtccctgatcccattcctcctgactgggcgagacctcccaatgagggtctccagccacctccaacagttgcatgtgggctggcaacargttagtacccccacaggatggagtttctagaggaaggcacaggctgccatctttgctgtttcatggcctttgctggtgatacttccacgtaygggagaaaccaaagcaactggggtctggagtggacccccagcaaacctcagcagccctatgatagagtggcttgactgctaaaagaaaaacaaacaaacaaacagaaaacaacagcatcaacaaaaaagacctaacacaaatctaattcaaagggcagcagcctcaaggattaaaggtagataagytcacaaagatgagaaagaattaattcaaaaacaacgaaaactcaaaatgccagagtgtctcttctcttccagatgactgtgacacctcaccagcaagggcacagaaccgggctgaggctaagaattgacagaagtagacttcagaaagtggataacaataaactttgctgagctgtaacccaatgaaaagaagctgagaatcatgataaaacaatacaggagctggtagccagaatagccagtttagagaggaacataactgacctgatggagctgaaaaccgcatctcaagaacttcacaatgcaatcacaagtatcagtagcaggatagaccaagaggaggaaagaatctcagagcctgaagattatctatctgaaataagacaggcagactagaatagagaagaaagaatgaaaagaaatgaacaaaacctctgagaaatatgggattatgtaaaaagaccaaacctatgactgattgggatccttgaaagagacagggagaatggaaccaagttggaaaacatacttcaggatatcatccaggagaacttccccaacctagcaagacaggccaacattcaaattcaggaaatgcagagaaggccagtaagatactccacaagaacatcaacccaaagacacaaaatcatcagattctccaatgccaaaatgaaagaaaccatgttaaggrcacctagagagaaaggccaagtcacctacaaaaggaaacatatcatactaacagtggacctctctgccaaaaccatggaagccagaagaaattgggggccaatattcaacattctaaaagaaaataatttccaacccagaattttatacctggccaaactaagcttcaaaagcaaaggagaaataagattcttttcaaacaagtgaatggttaggaaatttatcaacacaaggcctgccttgcaagagctcctgaagaaagcactacgtttggaaaagaaagaccattaccagccactacaaaaacacactgaagtacacaggccagaacactatgaagcaatcacataaacaagtctgcaaaaaagcatcatgatgacaggatctaattcacccataaaaatactaaccttaaatgtaaatgggctaaatgctctagttaaaagacacagaatggcaagctgaataaagagccaagacccatcatcagtatgctatcttcaagagactcatctcacacgcaaggacagacacaggctcaaaataaagggatggaggaaaatttaccaagcaaatggaaaacagaaaaaagcaatcctagtttctgacaaaacagactttaaaccaacaaagatcaaacaaacaaagaagggtagtatataatagtaaaggattcaattcaaccagaagagctaactatcctaaatatatatgcatccaatacagaagcacccagattcataaagcaagttcttatatacctacaaagagacttagactcccacacaataatagcgagagactttaacacaccactgacaatattagacagatgattaagacagaaaattaacaaagatatttaggacctgaactcaactctggatcaagtggacctgattgatatctacagaactctccaccaaaattcaacagaatatacattcttctcattgccacatggcatttactctaaaattggacacataattggaagtaaaacactcctcagcaaatgcacaagaactgaaatcataacagtctttcagacgacagtgcaatcaacttagaactcaagattaagaaattcactcaaaaccacacaactatatggaaattgaataaactgctcctgaatgactcttgggtaaacaatgaaattaaggcagaaatcaagaagttatttgaaactaatgagaacaaagagacaatgtactgcaatctctgggatgcagctaaaacagtgttaagtgggaaatttatagcactaagtgcctgcatctaaaagctagaaagatatcaaatcaacaacctaacatctcaactaaaaggactgtagaaccaagagcatacaaaccccaaagctagcagaagacaagaaatagcaaagatcaaagctgagctgaaggagatagagacatgaaaaaccctcttaaaaaaacaatgaatccaggagctggtttttttgaaaaaaagttaataaaatagatagactgctagctagactaataaagaagaaaaaaagaaaagaatcaagtagacacaatcagaaatgataggggaatatcaccactgacctcacagaaacgcaaacaaccatccgcaaatactataaacacctctgtctatataagctagaaaatctagaagaaatggataaactactggacacatacaccctcccaagactgaaccaggaagaaactgaatatttgaatagaccaataacgagttctgaaattgaggcagtaataaataatctaccaaccaaaaaaagcccaggaccagatggatgcacagctgaattctaccataggtacaaagaagagctggtaccatttctactaaaactattccaaaaattgaaaaggagggactcctcgctaactcattctatgaggccaccatcatcttgataccaaaacctggcagagtcacaacaaaaaaagaaagcttcaggcgaatatccctgatgaacatcgatgcaaaaatcctcaacaaartacttgcaaaccaaatccagcagcacgtcaaaaagcttatccaccacaaccaagtaggcttcatccctgggatgcaagcttggctcaacatacacaaatcaataagtgcgattcattacataaacagaactaaagacaaaaaccacatggttatctcaataggtgcagaaaaggcctttgataaaattcaacatccctttatgttaaaaactctcaataaactaggtattgaaggaacatacctcataagagccatatatgacaaacacacagccaatatcatactgaatgggaaaaagctgggagcattccccttgaaaactggcacaagacagggaagccctctctcaccactcccattcaacatagtattggaatttctggccagggcaatcaggcaagagaaataaataaagtgtattcgaataggaagagagaaagtcaaattatctttatttgattttatatctagaaaaccccrttatctcagtycaaaagattcttaagctgataagcaacttcagcaaaatctcaggatacaaaatcaatgtgcaaaaatcacaggcatttctatacaccaacaacaggcaagcagagatccaaatcatgaatgaactcccattcacaattgctacagaaagaataaaatacctaggaatacagctaacaagggaagtgaaggacctcttcaaggagaactacaaaccactgctcaaggatatcatagaggacacaaacaaatggagaaacattccatcctcacgcataagaagaatcagtgtaatgacaatggccatactgcccaaagtattttatagattcagtgctattcccattaaactaccattgacattcttcacagaattagaaamatctattttaaaattcatatggaaccaaaaaagagcctgaattgccaagacaattctaagcaagaagaacaaagctggaggcatcatgttacctgacttcaaactttactacaaggttacagtaaccaaaacagcatggtactgataaagaacagacacatagaccaatggtacagaatagagaactcagagataaaaccgcaaacctacaaccatctgatctttgacaaacttgacraaaacaagcaatggaggaaaggcctccctatttagtaaatggtgctgggaatgctggctagccttatgcagaaaattgaaactggaccccttcctttcaccatatacaaaaattaactcaagatgaattaaatacttaaatgtgaaacccaaaactataaagacccttgaagaaaatctaggcaataccattcaggagataggcgcaggcaaagatttcatgatgaaaatgccaaaagcaactgcaacaaaagcaaaaattggcaaatgagatataattaaattaaagaacttctgcacagcaaaaggaactatcattagagtgaacagacaactttaagaatgggagaaaattttcccaatctaaccacctgagaaaggcctaatatccagagtctacgaggaacttaaacaaatttacaagaaataaaaacccattaaaaagtgggcaaaggacatgaacagacaattctcaaaagaaaacatacatayagccaacaaacatatgaagaaaagctcaacatcactaatcattagagaaatgcaaatcaaaaccacaatgagataccatctcacaccagtcagaatggctgctgttaaaaagtcaaaaaacaacagatgctgatgaggttrcagagaaaaaggaatgctttttttactgttgtggggagtgtaaattagttcaaccactgtggaagaaagtgtggtgattcctcaaagacccagaggcaaaaataccatttgactcagcaattccattactgggtgtatagccataggaatataaattattctgttataaagatacatgcttgcatatattcactgcagcactattcacgatagcaaagacatggaatcaatctaaatgcccatcaatgatagactggacaaagaaaatgtggtacatatacacaatggaatactatgcagccataaaaaggatgagttcatgtcctttgcagagacatggatagagctgaaagccattatcctcagcaagctaacacaggaacagaaaactaaacactacatgttctcacttatgagtgggagctgaatgatgagaatacatgggggaacaacactcactccggcctattagaaggtagggtgtggggagggagagcatcaagaagaataactaatggatgctgggcttaatacctaggtgatgggttgatctgtgcagcaaatcaccatggcacatgtttacctatgtaacaacccttcacattctgcacttgtacccctgaagttaaaataaaagttgaagaaagaaataaataaataaaacgcagtccatattcaaaataaaaataaaagaaccacataggcacataaatgaacttatgccattatattggatagaccaatgtctatgcagtgtactttttatggaaaatggatgattcaacagattcaagaacccacagggcagggccagaggcctgaatatttatccctggacagatgtaagattgagtcttaatcagagaacttccatttgccaggcttgatctcagagtaattatggacgagtaactcctgagtgcctcttgtttccccttttttgaacaggagtgtcaatagtgattattctatgccagttccaccattgcatgttaagtgtgtggggccaaataacttgagtacactttagttcaatgtctttgtatctagaggtattgtacctgaggaatcacacctgagaggcattatctgtacttggacctgatttaaatgatatttagcctttsagctgttcctattttacaatgagaatctcagagagaggatcgagtatattttacatgtgagagctcatgaattgctggggatcagaggtcaggctgtggagacagcttccagaattgcccacaataatctctgcctcctggtattcatgcccgaacattgttcgtcgcacaatgaatagggttgacctctgtagccaatgggatattgtggaaatgaggggacatgtctttcaggcctaggtcataaaagatattgcaagtttagcactcttggaacgcattagctctcttggatcacatgctctggagaaaatcagttgtcacattgtgggacaccagcagccctaggacctctgtgtggtgaggaactgaggcctcctgccaatagctctcaagaaacytgtcttggaagcagatcttccaacctctgtcaagctgtcaggtggctgcagctttggccgccatgttaatcgcaaccagggcaggtcacaagctagacccacctagctaagctgctctgaattcctgactcacagaaattgcatgtgataataaatgtttattgttttaagccactaggttttgaagaaaattgttatrcagcagtagataggtaacgcaaacaccctttctacttctttatttacctttgtttttgagtagaattaaataggtacataaatgaacatgtattatttatattgggtgaactaatgatttctattattattcaaagcgaccacgcttaaacgtttctataactttatcatctgaaatcttcagttatgttcatagtttcttctcacttccacaacactcaaagtttaccaaaccttactgaagtgactgttaaatttatgtgactaaacggaataagacagacataaactgttgaaaggtagactaaattcctgtactacatgctgaaattaatagcttagactagacttccataaacagagagtgtaaaaatatcaggcatattaccaaagaaagcactcagagagaaagttttcttgttttgggttaacttcttgttgtttcttctaactaaaatacagaaatatagtcattgtctcttgcctaataattattacgctatgaggagatattttgacctgttaataaaatacaaatcaagatcaagaaaaattttgattatagcaatcccccaatctgcggttttggtttccaagatttccattatctgtggtcaactgtgatccaaacatattaaatggcaaattcagaaataaacaattcatacgttttaaattgctgccattttgagcagcatgatgaaatctcacactttcctgcttcatcttgctcgggatatgaatcctctgtttttctggtggatccacactgtagccactccctgccccttagtcacccagaatcctcagttacaagattgtcacagtatctcagtgcttgtgttcaagtcacccttattttacttcatcatggccccaatgcaccagagtattgatgctggcaattgggaggtgaargagaagccgtaaagtgcttcctttaggtgaaaaggtgaaagttccccacttgataaggaaagaaaaaataatgtatgctgaggttgccaagatctacggtaagaacgaatcttctatctatcaaatggtgaagaaggaaaaagaaaatcatgcttgttttgctgtcacatctcaaactacaaaaattatggctacagcacgcgataagtgctttgttaagatggaaaaggcattaaatttgtgggtggaagacaggaacagaaatgtgttccagctgatggtcattgggttcagtgctatccacagtttcagacacccactgaaggtcttgggacacacccctrcagatcagggggcactagtggatatgctccaacctgaagaatgttaattttgataattaaaaataggacaggggtctcagatatagttatctcacagtttaaaattttaatagacatgaagtagaaactagaataaacaaaagaaaatttcatattacgaatttaccaaccaacattgaaaggtaataatacctcccaaacagataagttgattgacccttttaaatggtgattcatgagggagttaaagctataaaatttctcataactttttatcaaagatcaaatcataacattattttttcttgcattatgttaaaaagttccaaacacgagtaatctagttttaaataggttagacaagtagtttctgaacttttcccttccttctgataattattcttcaaaaaccccatattagatatcattttctccaaatggcaattattaaccaatgttcaccttttattttgctgatccacctatatccttttttattgcctctctctaaggacaaggactgtgatatgtttccttctgtttccccagcttttacaatagatccagcatgtagtaagcttgaaataataataataaaataaataaatcatcacgacatgccaagtgtcacccccatgaattaatataactatagtcaaaagcagataattaaaattttagtctgtgaatcaacattgctaacaaaggtgtagtaggtcattttttaaaagtagaaaataatttgtaaatcacttattaccactttcacagatcccaacaactctacagacataaatagttcgatctgttaaaagatacatgacttcccttatgtttgcaggtattaattttgtagcaagcttacctactccagtgaccaaaagtgattctatttagacaggatccaaactaatactttggcaacacattaatttactcactcttttaaacatgactatcacgtaggtggggaatcttaacaaaatatagctttcattaagatcactgtaagacattaataactgaggttaagatttgattctttacagaaatagaagctgtgtcatagaaggaatcaaagttgcaggcagattcagaatttcaaaatcacatctcagcttgtgccacttatcttgaacaaatctctcaactattctgaatccacttttctaatcttaaaatgggactattattctcyggaatgttgggcagattaagtgagaaaacctatatgagacagcttgagaaactatcaagtactcggcaagtggtacgtatttttactgttatattttactctcaatagaggcttatttatttatttatttattttattatactttaagttttagggtacatgtgcacattgtgcaggttagttacatatgtatacatgtgccatgctggtgcgcaaggtaatttacagattcaatgccatccccatcaagctaccaatgactttcttcacagaattggaaaaaactactttaaagttcatatggaaccaaaaaagagyccgcatcgccaaggcaatcctaagccaaaagaacaaagctggaggcatcacactacctgacttcaaactatactayaaggctacagtaaccaaaagagcatggtactggtaccaaaacagagatatagatcaatggaacagaacagagccctcagaaataactctgcatatctacaactatctgatcttcgacaaacctgagaaaaacaagcaatggggaaaggattccctatttaataaatggtgctgggaaaactggctagccatatgtagaaagctgaaactggatcccttccttacacattatacaaaaatcaattcaagatggattaaagacttaaatgttagacctaaaaccataaaaaccctagaagaaaacctaggcatcaccattcaggacataggcatgggtaaggacttcatgtccaaaacaccaaaagcaatggcaacaaaagacaaaattgacaaatgggatctaattaaactaaagarcttctgcacagcaaaagaaactaccawcagagtgaacaggcaacctacaaaatgggagaaaattttcgcaacctactcatctgacaaagggctaatagaggcttcttgatctgagcctctggaatggcccttcctggtccccaaggccactggaaactcactgaggacacagagagctcagcctcaggcttcatgagcagcacactttggtccacagcacgaagggcacagagggactgcggagcagctgctacttgcaggtgggcatgtgaggctgggggactttgtgctgggctgaagctcaaatccacctgtgggaaatgaaggaaacrtcaaccagtgttttccctacttctgtgatcttgcagtcacctgcatttcctaagccacccttatattcagttcatatgactatgttggtaatgtcagtcagaaacctatttttacaactttccttcactttaaaaatagaaaataatttgtaaatcayttattaccactttcacagatcccaacaactctagagacataaatagttagatctgttaaaaggtacatgacttcccttatgtttgcaagtattaattttataacaagcttacctactccagtgatcaaaagtgattctatttagacaggatccaaattatctaatgctttggcgacacattaatttactcactcttttaaacatgactattacataagtggggaatcttaacaaaatatagcttctcggtagcttagtcttgtcctaaggagataactgaggcagaataaggatagataccttgttagatttttagatggccatctttatctctgacacatgataaggtaattctaggtgtttacacttattcttcaggttttgggaacttttgagtcttagcattttacatactcacacaactgaatcagcagagaagagcatcatgaacacaaaactgattgtattttatttggtagcagctttgtgtaattgaaaaagtgctgtactagatccctagaaatttgggtctgccataaacttgttgggaactgttgggcaactcattttacttttctggacttagttttctctggggtaaaatagatggcacctacagtatcatttatttgtgttcttttaattttatgttaaatcgctcacyttgttggctagacagttttcaatytcaaatttttcagagtctccaacaacttctccatctggtaaaatggcaaagatgaacattcgtgcaatgggggcaacgtctgactccacagggaaggataaggcaaaactgcctttcactggaacatggagagagtgagacaaaatggtcataagtgagacaaaatggtcataagtgagacaaaaaggtcataaaaatagtgtcataaggacactattgcttggtcttatccacttgagaactgcgtccattcattctaatggcttagtctctctatgtgccattagttatttggtgaaattagtaggccaatgtctcccttcagaactttaattatagcagaagttaacaaagttcctttcactcacatcttttttatttgatattccacttaactgttgcctaaatcaattaaatatcagtagctccaaattttctgcatatatatgtgacaactattttatttacatttcagactagaggtgattctcaatttaaatatagagctataatttgtaagatataataagtttattttgtcatatatgacttttaaaaagctctgtatgtaaaaaaaagttcatactaattgaacttcctaaaagaatatttaattcttggagttttcattgcagtgttaaactcttataagtacattggtatatttctactggaagcattaaatggtaccagataacacttcagaaaatactttacattttaaagcagggtgaagggccaccaggtagctacaaaagggcaasaacaaaagttccattttctgaatggtccactggggacttgagtagatggcccacatttagttgaataacggtaattataaaaccacgagagacttaatgactgaaaagtttctgagatgcctgtacataaaggacagatactctctggtattatttccatgtcttccttttctctacatccctcctgtcccagattcccagctatatggctttaaattcctgtgcttccaagttcttttccagtaacatattcttggtgcagttagacaatacataggataacagagtctctcgacattgttgaaactcaaaataatgtaggacaaggacaattagaattgtagaagaactataattgattttatttttttcttaaccatatgtattaaaaattaagtctaatacccttaggaatattttacaaagtataatatcaggatgaacaaggctagctatctaacacacaacatgaagactgtagttaataaaatggtactatattttagatttttgtcaaatgagtgcattttagctgttcttgccacacatacacaaatgagtaagtaggtgagatgatggccatgttactttccatcactatagtagtcattttattatctatatgtgtcccataacgttatgttgtacaccttaaataaatgtaatttttttttgagacagggtcttgctctgttgcccaggctgaaatgcagtggtgcaatcatagctcactgcagcctcgaatttctgggctcaagtgattgtactgcctcagcctccccagtagctgggactataggtgcacaacaccacgtttggctaattttttatatatttttgtagagataggatcttgctatgtagcccaggctggtcccaaactcctcggttcaagcaatcctcccaaaatgctgcaattacaggcagcagccaatgtgcccggccaaaatttacttttttaaaatgattatattaaagcctgagattggtggcactcaattaaaaattgttataactctacgtagaatrtggaatttttccaacttcatgcaaatttgactttagcttaacattacttrttttatatcactatgtgtttatactgcaaagctcttaagtttgggaagaaaggaagcttaaaatatccttaaggcagtgttatgccattcatatttgtgttcagttggacagatcaagttttagctcagacctcaaaaaggaaataagctccccttctaaaaggaaggaagcccttttatcactgtcttgagttcaacaaggaaagtggggtagattgaaatgtcataaaaccagaaaaaaaattrtggtgactttatggcaaagaatagtggtaggaaattaaagcttttaataataaaatttgccaacacatgtgtgtgtgtgcaccctgccttgccactgctggcagcgtgagtgtcctccatcacccctactcctaccacacagccactgacatcagagcattggcaggcactaagctcgccaaccccacccctgccagcaccctgcccctgcaatggagctgccagtgcaaaactaggcacaaaacacacaaacccacccctagccatgtacagacactgccaccagtatgaatgcacacaaaaggttcatacagtcctgcacccaccagtgccccacccccatgctaacaccaccgtcagtgcaaatgcatgcacagttgctagtggggatcccccaatcccctgagtcatactgccatgatcattgctatgaatgcctgcacaaaggccagcaacctggcacctgctagcaccctgccacagctgatgagcgtgtaccccaccacgctgccactgccatgctgctggtacatgtgaatgaggagggatcccactgctaccatcctgcaaagtgctttggctgacatcacccatggaagtgttgtgaccagtggtctgggagcaccttggtcccttcagtgcaacatgttcttaacctcaaggagccagagaacaaagctggagccagataccagttccccagagttacagcatgcaatccaggagtcctgaactgagccttgctcctccctgcctccactgcccccaaatcttctggtaacaaagtcagttgactgaactcaccttataccacaatcaaacctccaaggtcatcgaataggataaaaggaaaaaatcaaaacaacagcagtttctaagagtgaaggaacatcagcccgcaaagatgagaaagaaccagcacaagaactctgacaactcaaagagccagagcatcttctttcctccaaacaatcacaccagttctccagcaagggttcttaatwgggctgagatggctgaaatgacagaaatagaattcagactatggataggaatgaaggtcattgagattcaggagaatgttgaaacctaatctaaggaagctaagaatcacaataaaatgatgcagaagctgacagacaaaatagccagtatagaaaagaacataaccaacctgacagagctgaacaacagtctacaagaatttcgtaatgcaatcacaagtattaacagcagaacagaccaagctgaggaaagaatctcagagccacaaaattgactttctgcaatacaacagtcagacaagaataaagaaagaagaatgaaaaggaataaacaaaacctctgagaaatctgggattatttatgtaaaaagactgaatctacaactccttgatatccttgaaagagatgagcataatgaaagcaacttggaaaacatattttaggatatcatccatgagaacttcccctcctagctagagaggccaaattcatattcaggaaatgaagagaaccccaaaatatacttcacaagaaagtcatccctaagacacacaatcatcagattcaccaaggttgaaatgaatgaaaaaaaaaatgttaaaggtagctagagagaaaggacaagtcacctacaaagggaagcccatcagactaatggtgggcctcttagcagacaccctacaagccataagagatttggggcctatgttcaacatttcttttcttttcttttcttttctttttttytttcttcttgacagagtctcactctgtcaccaggctggagtgcagtggcatgatctcggctcactgcaacccccacctcccaggttcaaacagttctcctgcctcagcctcccgagtagctgggactacaggcgtgcaccatcacacctggctaatttttgtatttttagtagagatggggtttcaccatgttggccaggatggtctcgatctcctgacttcatgatctgaccaccttgrccccccaaagtgctgggattacaggtatgagccactgcacctggccaacattcttaaagaaaataaattccaaccaagaatttcatatctagccaaactaaacttcataagtgaaggagaaataagatgcttctcagacaaggaaatgctgagggaatttgttaccaccagatccaacttgcaagagctccagaaagaagcactgaatataaaaaggaaagaatattacgagccactacataaccacactgaagtacacagaccagtgacactatagagcagttacacaaacaagttgacaaacagctaacaacatgatggcagattcaaattcacgcatctcaatattaacctctaatgtaaacagactaaatgccccaattaagaggcacagagtggcaagccagatgaagaagcaagactcagtggtatgccgtctttaagagacccatctcacatgcaatgacactgataggctcgagataaaggaaaggagaaaaatctgtcaagcaaatggaaaatagaaaaaagcaggggttgccacatgcccatcaatgatagactggataaagaaaatgtggcacatatacaccatggaatactatgcagccataaaaaaggatgagttcatgtcctttccagggacatggatgaagctggaaactgtcattctcagcaaactaacacaagaacagaaaaccaaacaccacatgttctcactcataagtggaagttgaaaaatgagaacacatggacacagggaggggaacatcacacactggggcctgtcgggggtggggggctgggggagggatagcattaggagaaatacctaatatagatgacaggctgatgggtgcagcaaaccaccatggcacatgtacacctatgtaacaaacctgcacgttctgcccatgtatcccagaacttaaagtataatttaaaaaaaaagaaaaagagaaaagcaggggttgcaatactaatttcagacaaaacagactttaaaccaagaaaggtcaaaaaaaaaaaaaaaagacaagagaattgcataatggtaaagggtttaattcaatgagaagacctaactaaacaaaatctacatgcacccaacacaggagcacccagattcataaaacaagtgcttagagaccttcaaagagactcagrctcccacacaataatattgagaaacttcaacactccacagacagtattagacagatcatcaaggcagaaatttaggatctgaactcagcacaggacccaaatggatctgatagacatctacaaaactatccactacaaaacaacaacacatacattcttctcaactgcacacggcactactctaaarccgatcacacaatcagacataaaactatcctcagcaaatttagaaaaatgaaatcatacactccacactctcggactaccatgtgattaaaatagaattcaataagaagaaaatcactcaaaaccatacaattacatagaaattaaacaacctgctcctgcatgacttttgggtaaataatgaaattttggcagaaatcaggaagttctttgaaaccagtaagaacaaagatacaacacaccagaatttctgggacacagctaaggcggtgttaagagggaaacttatagcactaaacatccacatcgaaaagttagaaagatctcaacttaacctcacatcacaactraaagaactagtgggtcagctgtgctgtgcaggtgatccatgctacaccctaatcactacttgctcttcggaacctgaaagttacagcaacggaagcttcaagatggaaaaaatggcagccagcctcaccctctgtgagctccgtcccagggaaatgtaaagttgctaccagcctgaaaaccctgatgggggtggggtggtggtggctgcagtcccaggttgtggggttgcccccatgmggagaagtgggactcacataaaaaatagtctggccaaacgtccttgatgaacattgatgcaaaaatcctcaacaaaatatttgcaaaccaatattcctgatgaacatygatgygaaaatcctcaataaaatactggtaaactgaatccagcagcacatcaaaaagcttagctaccgcgatcaagtagacttcatccctgggatgcaaggttggttcaacataggcatatcaataaatgtgattcattcatataaacagaaccaatgacaaaaatacgattatcttatcagatgtagaaaaggattttagtaaaattcaacacctcttcatgttaaaaactcccaataaactagatattgaaagaacatacctcaaaataataacagccatctatgacaaacccatggccaacatcatactgaatgggcaaaagctggaagcattctccttaaaaactggcacaagacaaggatgtcctctctcaccactcctattgaacacagtattggaagtcctcaccagaacaatcgggcaagacaaagaaataaagggcatcagaataggaagagaggaagtcaaactatccctgtttgcagacgacatgattttatatctagaaaaccccatagtgttggccccaaagctccttaagctgaaaaatgatgttagcaaaatttcaggatacaaaatcaatgtacaaaaattactagcattcctatacaccaacaacagtcaagccaaaagccaaatcaggaatgcaagcaatcccattcacaattgtcacagaaagaataaaatacctagaaatatagctaaccagggaggtgaaagatctatacaatgagaattataaaacaccgctcaaagaaatcagagatgacacaaacaaatggaaaaatattccatgctcatagataggaagaatcagtatgaaaatggtcatattgcccaaagatctctacaatgagaattacaaaacactgctcaaagaaatcagagatgatgcaaatggaaaaaatattccatgctcatagataggaagaatcaatatcatgaaaatggtcatattgcccaaagcaatttatagatttaatgtttttcctataaaactaccaaygacatccttcacagacctagataaaactatttaaaaatgtatatggaactaaaaaaagagcccaaatagccaaggcaatcctaagcaaaaagaagaaaggaggaggcatcacaccacccaacttcaaactatactacagggctacagttaccaaaacagcatagtacttgtacaaaaacagacacacaaatcaatgggacagaatgcagagaccakaaataatgctgcacacccacaaccatctgatcttcaacaaagctaacaaacacaaggaaaggactccctattcaataaatggtgctgagataactggctagccataggcagaakattgaaactggatccccgccttacacaatgcacaaaaatcaactcaagattggttaaagacttaaatgtaaaaccaaaaagtatacaaactctggaagacaacctaggcaataccattctggacacaggaactgcaaagatttcatgaagaagacactaaaaacaatctcaacaaatgcaaacattgacaaatgggatctaattaacctaaagagcttctgcacagcaaaagaaactatcaatagagtaaacagacaacttagagaatgagagaaaacttttgcaatctatgcatccaataaaggtctaatatctagcatctgtatagaatttaaacacatttacaaggaaaaaacaaaccaccacattaaaaagtgggcaaaggacaggaataaacacttttcaaaagaagatatacatgtggccaacaagccaatgaaaaaaagctcaatactactgaatattagagaaatgcaactcaaaaccacaatgagattatcatctcacatcagtcagaatggctattattaagagtcaaaaaataacagatgttggcaaggttgtggagaaaagggaatgcttatacactcttggtgggaatgtaaattagttcagccattatggaaagcagtgtggcgattcctcaaagagctaaaaacagaactatcatttgacccaagaatcccagtactgggtatatatccaaaggaatataaattgttctgtcataaagacacatgcacacatatgttcattgcaaccctgttgcaatgaacagtagcaaagacatggaatcaacctaaatgcccatcagtggaagactgaataaagaaaatgtggtacatayacaccatggaactatgcagccataaaaaagaacgccatcatgtcctttgcaggagcatacatggagctagaagctatcattcttagcaaaataatgtaggaacagaaaaccaaatattccatgtgctcagttataagtgggagctaaatgatgagaacataatggatacaaagaggacaacacacagtggggcctatctgagggtggagggcgggaggagggagagcagaagacattgaggcctattggagggtggagggtaggtggagaaagaggatcagaaaaaataattattgggtagtaggcttagaacctgggtaacgaaataatctgtacaacaaaccccatgacacgagtttacctacataacaaacctgaacatgaacccttcaaacctaaaataaaagttttaaacataataataaataataaaatttgagaagatttcattatttaaaatctcaattctgaaaattaaataggcaaataatttaggtaataataatttggacagtatgaagaatagtgtgaaaagagaacaatatgaggaagctcaacttggacaatttgaaaagttttaaaaagttgaatttagacaaattgtgaataaaatttgttcttttatcatagaggtgtaagtgcttttgataattctttggtgaagagtaaatcggtaattaataactattaaaatatgtggttaaaattgttttatgatgaaacaattatgatttaattagctatatagagaaattttttccaattgttgactcagctactttcaataaaattttgtggcatcttcacaaagtaaatgattaaataactagtcctcattttactatatagagattttcatacagactcttcctgttatgaataaaattcaaattggaatattataaaagaaaaaatcaaataaatgttttaaaacctttgattatttctgtgaatgtgatacatagaccagtattagaagaaaattattcaacaaaaattgaagaacaatgtacacagtggggtccattctccatatctaactacctctacactagtattgggaaaaaactgatattcaaaactggcagcagtttttaatgtttaattaaaataattattaattattagagtactgattaataatgcataaattttaactttctcaaaattgtttcaattttcaaaactgaaaaataaaaattaaaaattaatatttaatttttccagcttagcaggaagagaaactacataaatagaaaatattaggcatggagcaaatcctaatggttattaagtttagcttaggggtgtggtggaaattggtaaaatgtttcccttagtttaggttaattacaaaaatgttcacgggttctcttttcagtggtttaacctctagattatttgacttagaatagaaaacgatcttggttccccaggcctcaatttattcttgaagtgaatccaatttcgtatataaagtactcatggcctggcacaagaaaaaaaaatctatcacctttcttccttcccatttcccatgataattacttttttcttctctgcaatgttaatttaatcaatgtacactttattgggggtggagataaatagaaggcagcttagattttgaaaagagctttgttttgctgttagaagaaacaaactaaagtgaaaaactagtgtaccttagcagagtgactgatacagagtagacaatcacatttatctgttgactgttgaattttaaaatgccaaagagtcataagacgagtattttcctgcgtgtcctccttattgtgaagggatgatggaaacgatttcccatttatgaactgtcaccgagggaagggtaaggatgtgttaggggagcaaggagagatgaatctgaggatactcactgtctcctgactccacaggcagagtgtgggttccagatctgacgatgactcccttagccatgatctgaaatgaaaaaacagtgaaggaartttcttgagctggacacagttctcagccttctattccccacatgacccactttcagttgtcaagtctgtgctggagagaatcarcctcaagaaaactcatggaatgaaggacgcacaacaagaacacaaggtggctgtgtgcaagtagtttattttgacattcctgagcctattgaccacttttgtcctactgataagctgcaattgtattccatggcctcattcttaccaggtaatggaaactgagctccgataactctcccatggcctgtctattcagtgtatagtgtgccgtgatagtctccgtgtggccacagggcagggtaccagccacaggctccaggtgaatgtaacttccacttaaggagaaaacacgatttgcagtgtgctgagcrccctggtggtcttctgctacccatgaatagtgaaaacacaagttgggatgcacagtgaaaacctgagtaaacagaaaagcaaagaaagaatactgtcttgaaattcktcaccttagcttctcaccaaaatgaatrgttacaacggtgtcttccactctaaaatacactatgcctctccctcatactggtcgacagccaaataaatgaattttcagtctcccaacattcaaatattaaaaggaaatcatccacaaatttatctcttttgccctgattctgctaactcattactactttgacattttcctcctgcccctcagaactagaggaaaaatgagaatgataaataactcaaacaagtggaaaagggatttttcagatattagaattacctcatgaattggcttaattaaaattagggtttgtattaataaaacattctattaccttatgagcttcaaaattgtttttagtaatccttagtaaattagcatttatgcctcttatcattattgtgacttccaacctttaagacctatgtgayttctgaaactttaagccttgcagataatgttttgcgcacaattctatttcccttgtggtaactgctccttagcttttcttcaaagtgcacttatttttttctaaatttattaggcatattttgtggactcttctatttggtctcataataaagttcctatttaaaaaaaccttttgcgcataaacacatcatactaataatttacagatcttttaactccatgaaaataggaaattttaaagtgtagggacactatttagtcaccttttaaatcctagggagagcgagtgtctatcacatagaaaacattaaacatcattacatgtttttaaactgagttaacacgtgaaactgagaaacagaaataatgtatatgttatttatcgacactgaaatccataaattatagtcttttatcacttctttgagataacaagcatgaaaactttttagctagggaaatcttttgatcatcgtcattagacagtgtatattaagtgtgtgtgtgtgtgatcactttacaaaatttctaagtgacctggaaaaaataacataaaacaaagtacatgaattactgaagcagctgatattgttcacgacccaaatcaaataagatttttttcatactatataaaatgttacagataatgatagtgaaattatcaggcacttctgcagtgccttttctaatgcctttattgtttttcatgaaattctattatcctcaaatttgtaaactcaaagttagatatcttcttatttcttactcttaaatgcaatctgtacatttcttctgaatatatcactgttcctaacatttcctttgtcctcagagatttgtctttctatacttacccggacaaaaagtttattaaccgagatactggtagtattgattgaaaactgtgcaagaccctgctcattggtggttgcattggagtaataattggcgtcattcacagaratgaagaagastttattggggatgggcacaccttttccatccaccagaagcacctaaagaagaaaagtacttgatagttgatgtgaacaacacccagagaggactgaactcatgtgaacaaatgcttttgctgctataactaaaacaacaacctccccctcaaaaaaaccccaccaaaccttcatatttacgacaaaatgtttccttccatttggatcctcatgtcctacatagcttatctatgaaactttgtagtatttccagtaaagtcagggagtttttttttttttttttttgagacggagtctcgctctgtcgcccaggctggagtgcagtggcgcgatctcggctcactgcaagctctgcctcctggactcacgccattctcctgcctcagcctcccgagtagctgggactacaggcgcccgccaccccgcccagctaattttttgtatttttagtagagacgggrtttcaccatgttagccaggatggtctcgatcgcctgacctcgtgatctgcccgcctcggcctccgaaagtgctgggattacaggcgtgagccaccgtgcccggccaaagtcagggagatttttaataactacaacttgccacttaatatgcacttggaataagaataaaagaaatgaatttaaactggctgtttttcccttttcgcatagacggaggctagaatgcttggctgtgttctgaactctactagctaaaaaagttacttctctgcgcttcagttttccaccttcattaaaagggggataatagttgtgcctcctttatatggtagtattgaagattaaataattatttaaaaatacattagaggagtagggcgactatagttttccaataatctgttgtgatttaaaaatagccagaagagaataatttgaatttttagcaaaaaaaggacaaatatttaaggtgatgaatatctcaattatgctgattggatcttcaaaaattatttgaatgtattaaataatcacatgtactccccaaaattgatactatgatgtatcaatttttaaaaaatttaaaataataaaaatacattagaagatatttggtgtacgataattattccataaatgttagttactaacgttattattatctcctgcaacaaaccagctaagaaaatacacatgagaatgttttcttcccttcctttcccttccccttcccctggcccttccctttccccttcccctttttccttcttttccttttccttcccctttccttcttttcttttctttcacaactggtctctgttgcccaggctggagtgcagtggtgccattataactcacagcagcatcgaagttctgggctcgagggatcctcccacctcagcttcccaagcagctgggactacaggtgcacgccaccagcccactgctaatttttttttttttttttttttttgcagaggtagagtcttactatgttactagggccgatctagaactcctggcctcaggcgatcctccccccttggcctcccaaagttctgggattataagcatgagccactatgcctggccaaatgtctcaatttactaattataaaacaggtaaaattaattatcaatatgaataaaattaatattttattggctttattattgttaaaatatataagttaaacatataaaaatataataataataaccatgaaatgcatgttattttaatacctatgcctaaaattaaagacttatttatttatgtcagaagagatcaacagatataaaaagaacactgacagccataaatgttacaaactctgaaaattctgatgctgcccaggtcatgatagaaatatcatttattctaaactgcatgaaagaagaggtttgatataacaactaagtcacattacattaagtatctttattagctacatattaaaatattatctctgattctcataataatttagtatgtgtctgtttgtttcatcagtgatatttagaaaggaaagtatttctccttggtttcatggtttttggtcatattaattaactgataacactaaccaagtgtgggctgcatcattgtgtcctgtgcttaggtgcaactggatactttgcttacctgtgcattacaacatatcttacctgtgcaaaaaaggggattccttgtctaaagtgtgaatccactttcacgaatttgagtttggatacaatgtttgtgatttcactgatcctgtttgcagtgacttccaggtctgaaaaatataaagagtcagtacttttagaarttactttagtcataaaatttctttcttacaaatgacctttattttgttatggaaagtaaactattgttttatttcccatattcgttcattactcacacctgtcccctcttctctgatcctggcttccactctaagcttcatttcaaagcccgtatttgtaatctggagcattttggtgtgtacttgttgggtgatgcagccattgctgttaagctgagaaaaataccaaaaccaataaatgtcaaactgattgagatcaatagtcactgaatctactattctgtctctaatgacaagaaaacttttttttttgcattaagtaagttaattgaccttcgagaacttaatactcatatctgctttgtaacctccaaagttagtcgtccaaatgagaatcttgttgactaagaacagaaattcgttttttggtgggggatattttgcgacaagcttgtcctgatgccctctttctagttagtaaaatggagtctcactggtygtaaacagtgatagcactgagggagaataccrcctactaacctgttgactgaattcctcacagacctcctgcttgtcacaattaagaacacgagataattttctacacaggctcacagttgcaagtcctgggacaggcttcccataartgtatctggtacatgagaaataaatcaggaattgagaatggctgtttgcattttccactaccactcctccacagaactgtccctctttagagttgcctacacatctttatcatctgggtgcccaccaagtagaaagctgtctggaaaatgtctccctcaaaaatattagccattaaaacctttgaaacttgactgcactgtaccaccacattctctttgggattgaatatatatatttatataaatatttttatatatttaatatataatattataattattatattttaatgtttaattaaaataattattaattattggagtactgcttaataatatataataatataatatataataatataatatattatatataaatatattatgtataatgttgaaaataattattaattattagagtactgattaataatatataatgtaatatataatatatgacataatataatatataaatataatatatattatatatttatatattatattatatattatattatataatataatataaaattattatatatattatacaatacataatatatataattatatattatacaatacataatatatataattatatattatacaatacataatatatataattatatattatacaatacataatatatataattatatattatacaatacataatatatataattatatattatacaatatataatatataatattaattatatataatatataatataaatattaataatatataaattatatatatttatattatatattatataagttatctatatattatatttatattacatatttatatattatatattaatatatattatatatatatttaatcccaaagagaatgtggtggtacagtgcagtcatatatatatgcaaacatatatatatatatgtttttcctttggccaggtgctttggctcatgcctgcaaccccaacactttgggaagccaagaaggattgcttgaggccaaaagttcccaactagcatgggtaacatagcaggacccaatctctacaagctttttaaaaagattagctgggtatggtgacatgcacctgtagtcctagctacttaaggaggtttaggcaggagattcacataagcccaggagtttgaggctacagtgagctaagattgctccactgcactccagcctgggtgagagactctgtctactaaaaaaatgtttcttccttttaacctacttattttctatcattcttctttattttgttttaataatatcaaagcttattctgtataccaagtgagcaaatgtagatgatgaattgaataaaaataagtacataataactaagcaaatctaacacaaaatgcacagacacacgcacacgtgcactgacacacatgcacagagaagagaagggagagagagggagaaaaagaagcctaggaacacatgaggcatgtaaatacaaaataattagtggggttatgtgtgtgtgcacatgttatattagtcctttctctgattagataatgggtaacagaataatacacaataattttgttttggacattggttttctttcctatttgcaaatggctctgaaattacttcaaataaaaagatagaatcaaagcagcttattctgaagcccttctccaacatatagatatctgcactacggcactattaatttggacacataactccttggccattgctctgaggctgaaatgaggcagagatctaggcgttttggtgtttctggtatataatatttaggctggcatattcctttaccctgcgtgctccctctgggactgtttgtttgtaggctatcagttttgcttcttcaggttaaaaggaactgtaagaggtatctgtaatcacagagggcaacagtggaaaggaacrtcataggtaaggttcatgccctctgtctactgcttaagagatggaggcacagagaagcagcagaatgcctagtgaaaacagtaagttctgataggggaggcacactcatcactgccgattctgagtctagtacccttcataatcatgacatcagtcactggatcatttatattatgtttaagtcacttctataaaatcctaatcattggcttttgcccagtaattgtgacctgtgatctttaggtttctctgtcacatttttagtccatcgtatcagcgcatcctccttcctcaatgacaggattagtatttatggtatacatatgaagaaaaggagaaagtgaaatttcctggagtggaaatttctgggggagagattatttcaggttattaaacaatttgttctaccattgcactatttctggttattgaacaattgttctatcaaaaagatcaatgtaaaacattcaatgtatcctcttaaaattgcccagaggaaagattaggcataattaattcaatgttccatgagaaaacaaacaggcagattctgcaagcaagacttctagaggccaactgatgatcttcagcgaaatgtcattaaaaaaaggaggttatagacttttaaacctctaagatatttatagattcctatggcttgctttaaaatattagagcaaaaaaactactgtagaggaggaaatgggacaaaaagaacctggcaaattttacaattttaaaaataggtgataggtacatgaaattgtgttttacttctctgttaactttggcacgtgattgaaaatttccgttgtagagagtttggaaaaagaaaaggtacttaggagtcataataaccaaaaccaatgtgcgaacacccagctttatgagaccatttttaggacaattgaagatacttgactgtaaacttgcaattagttttggaaaattacttccaattttgttaagtgatcgtgttgtcgcagaagtggacratgtctctgtattttagaggtacatactactgcatgtacagaaaaatatcatgatctttgtgatttatcctaagatgttaaagcaaaatatatgatgaaacaatacggaaagatgtttattgttaaatcataattaagtgtgtttctrttcttttatgtatttgaaaattttaatagtaagtcgttaaataaagagaagtcaaaggagtaatattacaaaagtgctgaggcaaagtaaatttataattttgtacctacataatcmctcaaaattgaggcaaaatataaaattttagataaaaacaatgtaactcactctccacagactgttatgttcactttttcatccatgatactgattatctttggcacctgaactttgacctcaaacttgggaagcactgttaatagagataataggaataaggaaggttggtaaacatttattggaaatacaaataatttcagtatgtctataatttttcccaaaataacactctgaatgttagatttactttccaatgtatcaactttaagatggtaaggtttaacaattcatgcagaatctaactgacttcttgagcacagcgggtctcagtgacgttaacaaatgatggtggtttcactgaaacaagaagtttcatacttggcaaagcgtaatttgctactgaaaatcagcaagctcttatgagcttctgtgttcacaccgtcctaatggtcttagaagcagtaagtctgactctactgcaagttcaacatatctacaggaaattcaaaggatctaagtgagctcacactctaggaaccaaaatgttatgcctttttcatcttccataatccataccaaattcctccacggtgaaggggtgctgtatccttccacctgattctgtctgtaccaccaccctgtaggagccctgaatgggctctgatgagaggggaaaggacaactgattgatgccagcttctagcttgagactctgccattgtgcaattcgatttcttcttgggttctgaagggaaacaagaaacatgggcggtaatcatttagtcacaatagtccttgagcaactcaaatgattttgaaggtgataattagcattgcctctggaaagacaaatacagaaggaagagaaaatacaatcaacctgacaactgggagtaggaggaattcagatctgaaawtttttaaagtagttcatctgtctagagtattatcagaacctcctacyctctaaaagcactaatttccttataagatactttttctgatacttacctcaaggtatatcagtggaatctatatgataaaaggaaagaagagatgtgattagaattccagcaaaggctacaatttcagacttgtgatcaaacaacaaactgaggaagaatattatctgtagctaaattcaacaagaaacataacagaactggaaaaatctcagggaaattattaaatagttctaggatgagcatacacaatatattcaataattattattatgtgttgccatttccctgaaaattattattggtgaatgatattattgaatctttaagtattaatattatttggatactaaaattctcctagtgaataatatgactatactgcttactttcataagttgggaaatagatattaatagagttatatgtcattatgatttagacctaacagaaatagaattcccagaatcatttggttgmaagtaaaccaagaatatttcttctaatttcaacattgtctattttctacctattaaaagyagctttgttcctttgcactaatattgaaggtaagttgaaaaaagggaaattcaattagcataaaaaagtctttgtgtataatatatttctatactatatgtatcgaatatataataaaattataatatggtctattgtatatacctatatattcataaaagcataattctttgttgcttttttaatcataaattccttgaaagtatgaataggaatagtgccttttttctatgcttctttaatattcttaatgcagtgtgttcagagtaacaaatgcagctattgccagactgattaaatactgttataagagaaagaacttcctcatctcttgtccctcaatttttgttttgtataagactgcaaatctgtgctgaggctggagccaagttcaaaaacaagtgtctttcatcctctcgcttttcttgtacctttctacctcactctgggtgagtattcccactctacccacaacccaaaccacagatagtggatgcttaccagttcatttcgagggcgaaaattttcatccacggagacaacacggaatcttactggaaaagtagttctccgataagattcagacatgataaagcaggtaatttgggtaataagacaggaggctacggggctaggataatggagactttggctgttcaggtggcccttctcagtgttgccccaaacagtggaatttccctacttacctgtctgtcctggtttatacatgggtttgtctgtctggmcaaagaccagactttgggtgttcagtaccagaactgtgttcctcttcctgaaatcttgcgtaggcccctttatctggatgctaaggaatgccacctctgaagaggctgagatccttgggagctaaaaagcaaaggattttttactactgaggaactgtgcagtcttctccctctgcattcttcagtcattgctatttcctatctctccttcagcttcaccaaggagaaggaaggtgtgactatttcttcagacataagagtgacgatattaatgtgagatggaggaatggtatcagtaagagtggccatcaatagaacccagatctccatggagttcacctagagctctagttattaaattagatgccttttaactgagtatgtatattctgaagcaatggagagaaacatctctgaaaaaatatgggagagcataggagctgagtttcccaagttaggcaactttaaagaggtactaggtgtttgcttagggtatcctgcatgtgcaaaaaattatgttgcatgcaaagtttttatcatgaaattttcatatgatctatttctaggaaatgtccagcccgatccttaaagagacagttacaatcaaaactagaaaactcctctaagtcatgaaatttttgtgggcaataggattattatttaggaatgaaatttagaagagtatttcttccttactctggtaaaaaatgctttgttccttaatagttgaaaactcactatttttagtcctttctgaagtcctaactacattccttttttttttttttttttttttgagacggartctcgctctgtcgcccaggctggagtgcagtggggcgatctcggctcactgcaaacttcgcctcccgggttcacgccattctcctgcctcagcctcccaggtagctgggactacgggcgcctgccactacgcccggctaattttttgtatttttggtagagacggggtttcatcttgttagccaggatggtctcgatctcctgacctcgtgatctgcccgccttggcttcccaaagtgctgggattacaggcgtgagccaccgcacctggcccctgaagtcctaactacattcttaaagtcataccttgggatcgcacaccagagctccatcaccatgacctatagagctcaataaaatgtatcaagcagggatagccagctggcaccgtagcactcacagtgaaggagacacagtggaataagtccttctccgccaccaggtcagtgaagaggctcctgttttccctgccagactccaaggaagcacttacagtcactgtctcattcaggtggctcagaaggacacagcccttcttaggggcctcagtgtggagcagggaggggaccagcaccatatactgcctgggaaaggaagaagtctaaattagagaaaaactgatgatagtaagcgttttcayccataaakgtgttttcataacaatatgtattaattggtgcaatcagttttattctaaaagtcaatggactaagtcaatggaggttctgtcacagatcagcacaaaaattttatcttttactcatcagccatgcctcagccacacaatctggagccatacaacactggagattgctttccaagatgttacaatttcacaggcattccttgctgtaaagagcagtctgagctctttaaactttaactttgacctttaaaaagaatctgaattcttgaatatatatccataaaagtgcacgcacacaaacacacacacatatataaaaaattgggagtgattattcattgtaaaaaggacttacattaaaatctgtctagataaacatcactttggaatgaacaccgtgactagatttacagaaattcaactgaaagaacttcagtaagcatatatcattacacaaaataacacatgtctatattgcaaaatcattttcttaatatcagcaacactgaaaaaaagtatttgctgtttctcttaggctcctcagatacagctcagtcaaagtcaatattttatcaacgagtttgaaaattttgtcaattatttacatgcacaactccctgctacacacacactacacaaacacacactgtattttattatcatttccctttatgctcaatttcttgaggcaattaacattaataatttaatattagtatgtccatgtttataaacatgtttgtttcgaatcacatgggtggataggttatcttttcaataaaaaaaaacaaacaggttcaggctgggagaagtggcttatacctagttcccggcactttgggaggctgaggcaggagagtcacttgaggccaggagtttgagaacagcctgcrcaacattgtgaggtcccccatctctacaaaaattaaaataaaaaatttagccaggtggcacatggctgtagtagyagttactcaggaggctgaggcaagaaggatcacttaagcccacgaggttgaggctacagtgagctatgattgcaccagtgctttcagagtgacagagtgagaccctgtttcaaaaaaaaacaaaacaaagtttatatgagtactaaaagtcatattattttgaaaagtcttttcttttttatttaaattgttgaaagttttcagtttttcagaggcacaggcaattttttgtgtaagcctcacattctggccttagctttattgatgagtgtcctttgtctctaatgccccccactccatattttcctgtcactttccagaagcctccaattcaatataatctctccacactctgaaatcccatgggctgaaagagaatgtgtttttgttgttgctgtttttgagcatctgccacatgacaagaattgttaagctgtctctgtattaagccatttaatcttcccagcaatgctgtaaggtacatgcatgatactctccatgttcatggaagctaaaacatgagatcctcatcagtccccaaaacttgaatccataacagatggataaaatccctgcccccatgccaaatcagtaaaatcagtaaattgtgactaaaatgtaactcttcaaagctttaatgattcartgattcatgattcaatatctgcagggttaggccatttatagagtaaatttgcaagtaaaaactattattttcttrtattattttactacccttactttccattgccaacataaactcttactttttaaattgttttctggacaggcaatttgacacaagaaacccaatattgttgctttacaaaattaataggtgtgagactaggaggagagaatccaaggataattgagttgtggaatgtggaactcaaatttggtcccctcatcctccatgtagtctgctccagcacaccagtcttgctacatgtgttttaaagtgttcctgggcaaaactatatgccatgaatctccagggccactctgaaatcatccaagtttcagatgattttactgtatgagtagtaaggttttgttctctagcagagaagctgagggcagttcagtaactcactgatagtcattcagctagtctcttatgtcttaatctttttctggtatctggatgcttctgatctcctgatcactgctcttttaacagcataataaataataaaaatgtatcattttttacatccccatcaaaaaatttttcctttagttctttgatcttaataagaaggtatatatatatttataatttatttactatttttattcttataaattataagcctaaaagatatcacgattaaaaattaattccacatatatttgatattctaaagaactattttatatgagttcagttaatatttttttaacagatattgaartcagaacaaatccaggttgacaaacttgcccaagatgtcattggtagtgagctgctaaaatgttttaatatatgtttactcaatcatgaatgtttgcattttaaatatttgcctctttagcagggactaaatgtagcaaatattaaagtgataacttttaattttctctttttcattttattcccctgaaaccttcatctttctgaagcttactgccccaaggcaggggagaatggctattggttctcytttgtagtctctcacatttatcacatcaagggttaattctggagggatgaagttaagttttctccttataaagggagaaaacaccccttctgcttgtgacaactagggcatgaggcttgttgttctttgttcagtggcagacacaacgtaaaaggatggtttcaatggcagcatggtccaatgtagtgtaggaatgcatccagaaccacaaattgcttaatgtttctgacccaatacacgctactcgctttatccattcagtctgctctcagaaagcaaaatagcctccacatattcccatatgctttctggatggagagcagctggaagtagtagagcccactgctgtagatgaggtagagggatagtgggggagaaatgtacccctaccggttgccaggaaattgtgcaaggaaaaagcctgaggaaagcaggagacttactggattgaactccttatttctgctttctgcgctttggcctgaagaaggctatttgtgttagatggataagggtaacacacagagcagagggaccccttatccctttcccgatttgggactctgaagacttccctgtatcagtctggaatacaggagacacgataggcatctagaagtgcagtgtgggtatgcaagagagaggtagaagtttaacctctccaggacacctcagtgcctatgtgctattattggacccaagagttctcaccattctctggaagaaatgtaaaggcagctgggttaaggccagggaccttaaatggcctggactgcaaaggggcaaggtgaccctgcatcacaggctgtgttgaaacaatagccatagtatttgaggcaggatgcaaaggtaggagttctatgggatatgaaacagctgaagtgagacagtcagttagagaggactgttgggtcctgaacacacaagagaaaccagatggctaaacttcaacagtgcatgccagcaagtaaggagaagtcagactgacagtagccaagaaggacggagaactttgagaccaaggactctgacagttttctctattaggagttaatggagaccacagttctctagacactatagaggagaggaactggggagaggtggaaaagaagtcttacaattattgagttgtaccaacttacaactggatagggttaaaattattttccctgctttggtcccccactgggggctgttggtgaagacttgatacatgattgaaaaataaaggarctatactttctgtatatatatatatggcctacaatacatgttaagttgcacttcactatatatttcgaatatctctatattcagtgccttccatccaaaagaactgttctgtgaagttgggatctagtgttttatttaatcatgcttcctagtgactaatcgtatttatgactctgattggcccagtgtagaaaaaatgatttcaagaatagaggataaatgaaagacaaacaagggattaactggaataatttcttatatttggaaggtattgtaatgagtggaaaggtggcatttacaaaggaaggcaaagcgaagacacaagggagagactgaaacgcactctggaggaaggggtcttgagtgagacttacggttctgtagagtttgagtcactggcagaaagcaggataagaagtagcacaagacataaatgaagaagtctgtctttccgcattgtgagggataaatctcagggttgtgtccaactctctgccctcagcctcgccctggagaccagctgagtttaccaggctttatgtggccactatgtacaaacaagccccaccccaaggcctctgaatagagttcagaattgagcacagattccctaaaagggtcattactctcagtggttgcctcatttttctcaaggctaaattctgataggtactgaggcatgtctggaagataaaatttgtattccatttagaatgagctttgacagcaaacctcctgataaggaaccttcaacctacctttctccatctctttcaaaatccttacaagcaggtgacaaaggatgctgacaaagaatgtcagggacatgttaccatgatagtagctcatgcattgcagattcatttctgggactgagtgagttataactatagactttagggtttttgggttttcttttttagcagttgattgagtacatggtcctggaagaaagtgatataaaataaggatttcaagagtagaggatcaatgaaagataaaagagataaaagatcaaagagattttagaaaggagttatcaaagatcacacttgtctatttcacagcattgacctgatcagattcttagttgatcctatctgtccttgttactgtctgagcactctaacgtttgagtcccttaaaccatgtcattgactttatctgagatttttttttttgagccatactgtgtgctaagtgctattctggtgatgaaaatacaatattgaacaggatattcagtatccatgctctcatagaacttgtagtacaatgatgatcacatataaaccaccagcagrtttaatgccatccttagactgcagacattggtgtctgtttacatactgtattgcttgaaactttttraatcaactttctttctctttctccatatttcagcctaatcatcccttctttggagagcaaattcctggccacactgctgaaagtggattccttcctattagtttttatttcacatctttgtttcttttgtcacattatcatagaatgaaataatttcttttaaattatgaaatgttatatatatatatactcacaaatatagagagcaagataaaaracactcgtaccttacatgcacccaactttaataaaaktaaacacttgccaagtttgtttaaggtcatttcttcttaagaaatgaaagatggcaatggtagygctcttttaaaatttgtctagaagcttttccagtttttaccagatccaccaacccaaaaaaagaaataaatcaagacaaatatggttggagtttcctttgtaattctctccaatctcatttcccttccaatgttgtgggattaggaagttgatatgtattcttcaagatgtgtttatgtttttaatccatatttatgtaaataatatatagcataattttgtgttttgtattttatatgtataagtggtatgcacatattgtaaaatatgtcatcactattatggttttaagacttattagcattgataatgaggataaaatttattaattttaatgaccatctatacgacattctattgtatgaatgtggccgaacctgttactctattcccctagtgctgaattttggattcttcatagttttcaacattacaaataatactgctacaaatacggtatgtctacttaagcatatttgcaagactttctctagggtatatagcagagattgggttataggctatatatgtatgtacatcttgaaatctatcagattggtaaattgctcttcagagtattacatggatttgaatacccatctgcaacagtggatattttcagtttattatatatttaccatcgttttactctgctaggcattttactttttatcaatctgatgagtgaagcagtatcttgccttaattttcattattaatgactttacacatcttttcatatgtttatggaccatttgaattmtaccatcagtttgatatctcaacacaatatgtaaagggtctatcaggaacatctccttgccccagtttcatgagccttggactctagacgctgcaattttatttactaaaggctttaaaatgtgcttctaaatctctcagccaaatattctggagctgttaaataccctaaggggaaagtgcccttaaacacagaattgcccctttgggttgctatgttgcttctgaactttggattcataattcttcacagtctttgcttttcaatacctccagtgaatatatatataaccaaccattcctaatttaagtgggaagtttggtctcaattaccttgtataccattactggaaaggaaagtcttaagtgtgtatttttattttatataaagagtattggaaaaagaccttgcctgtttcttattctttttagttattgctagttttaaaacatcctcccatgtttatatgtttatatgtatgtattttattaattgcattttattacagtatagccctctttggtgatcatccaagaggtttaatgtttccactctcctaatgataaaaacaggattgtctctattgtcctgccatgaggaaataatgctttgataaatatctttttacatataccctttgagacaggtaaatcctcttgcaagacgcatacacaggagtgagattgttgtatgagaggcatgtacttaagtgactaaatagtgacaaataactctccagaatggttgcatcacaccacaattctaccagtagtgcatgaggattttcgtatccccatattgccaccaatactctagcttttacatttttcttccagtattcctttaaataagctttctgctcatttccctcttttctccttctaggactcccataatatgtgtatttgcatgcttgatggtattccataggtcccttatactttcttcactcttctttaattttttttcttttttcacctttaattaactatttacatgacctgtcttcaagttactaattctttcttttgtgtgactgtgtttgctgttgaagctctccattaaaatattcagttctgttcttatataatttttgtgtgttttttcttaatggtttctatttctttattaaacttctcattttgttcatacattgtttttctaattttatttagttgtctatctgtgttttcttgcatcttactgagcatctttaagatgattattttgaattttggggggaaatttgtagatctccatttggggtggagattagttactggaacttcattrgtttcctttggtggtattatgtttgcctggttcatcattatctgtgtaactttgcattggtttctatgcatctgaaggagcaaacaccttttcccatctttatagactggttttacaggtaaagatcctcaggatcctcctgttgggttcccaggattgacaagattgcttccagaattgtggtcaactggaggtagagccaggtcacatggttttgctgggtcaacagtgaggtctgtggttggcaggcctgttaactggggctctagtaggcttagattctgtctgttccctgggtaaattggactgcctcctagaccttggtcagtaggtctggcactgggatgagggtctactttagagtccacagattgtaggctagttacgagatatgtggatgaatgtggcttcctctgggtccttaggagggctcctactgggtcactgggtaggttcctaggcagacagtgctggtccagattgcagctgagagaaaagagaaccaagtaacagggctgcctcagggcctacagctgagacccaggtcttcaggcctgcctctgggttcatgaatgggcatgtgtcccactgggtccctgagtgggcaggcctgctctcaaatcacagatgagagggcctggagccagtatacagtgctgttttaagatccacagtgggaccaagttcagcctaccagggcacttgtgagcatttctcccattaggtccctgtgagggcaagactgctcttagactgcatcatagaggagctggtaccagatttcaaggccattttaggattcactgtataagaaagaaagtagccaatcatcttttctagtttttttatgttagttattttctttcattaaatgttataactaatatgtatagttgaggccatggtagaaacagtagtgacaaaaaacataactgtctatgcaagataataggacaaatgttttccaaatgaggaaaagagtagttttgtcttaaaatatctgatttttccagaatgtgaaatgggacagtgaaagagaaaatctgaatgaatgtgcaataaagtttgcaggaaaggaaattatttccttcatttataacattgaatctgaaaaaaaaaaccagtaaattttttccatagttggctattttttacaatttttaaatggacacaaattcccattacataacatttattacattacagtgtacaattcagtggctgttagtatgctcatggtgttatgtaattattaccactatgaaattatggaacatttccatcacccccaaaagaaactacatacatgttagtagtcacttcctattttcaacaagtagaaatactaattcgtgcattctctgcaaacactaatctactttatatttttatgaatttacctatttggacatttcatattaatagaatcataatatatgtggcctatgttgtgtggcttctttcacatagcgtgatgttttcaaagttcttccatgttgtagcatatatatagtacttcattcctttacatgagtgaacgatattgaacaatattccaatgtatggacataccacattttgtttatccattcctcagttgatagacatttgagttattctcatttattagctattgtgaataattctgctataaatatttgtatacaagtgtttgcatgagcatatgatttcattttttgggggaatatatacaggagtgaatctgtgggtcatatggtagctcagtgtttaactttttgcagaactgccagactatttttcacagtggctgaaacattttaaattcccaccagcagtgtatgaacatcccattttctccacatttttggcaacatttgttattctgtctatatttaatttttagaatgatagccatagtggatataaagaggtatctctttatggttttaatttgtattttcctagtgaataatgattttgagcatattctcatgtgcttactgaccatttatgtatcatctttagaggaatgtctgttgaattcctttgcccatcttttaattcaattgtttatctttttattgttgaattgtaagagttctttacatattttggatctttgatctttatcagatatataatttgcaaatatttactcctgttctgtgrgttgtctcttcatgcatgatagcgtcctgagacacatagaagtttttagttttaataaaatacaatttaaaacattttttggttcattgtgcttctgatgtcatatttaataaattattgcctaatccaaggtcccaaggatttatacctatgtctcctcctaggagttttattattttagctcttacatttgggtttgtaatcgatttgagttaattttttgtatataatgtgtgttaggggtccaactccaatctttcttttgcatatgggtatttgtttttttcatcatttatgttgaaaatattatcctttccccattaaatgttcttggcacccttttcaaaaataaactgaccaaaaatgtgtggatttatttatggactctcaatgttcttccattgatctatatatctatccttatgctagtaccatgctgtcttgagattgctacagcttgtgtggtaagtttcaaaattagaaagtagaaaagctcttagttctttttttcccttcaacattgttgtgactaatatgaatctttataatatccaaatgaatctaagaatcagtctgtcctttctgtataaaagacggtcgtaattttgatggaattgtgttgaatctgtacatcaatttggggactatctttgttatctttatccgattaagtcttccaactcgtgagcatggaggtattttagagttccttactctgccttttgtgctaatgtcacctttggcttaattttaattggcttattaatttaaaggtttataaaagattactgccaaatatatttatacagaaataattttactttcttttttttaaatgacatattgtttttagagtgcttaacaaaggttatgagattattacttaccttttgttgcaatgcgtccgtccagatagcagttatttgatgactcactagaatatttctctctgctttgtgttgactttacagttatgttaccttttctaatgctaattttaaaatatttgcttgtcattttgattacrtaagtgtaactgagtattacttcttgggcatataatgctatttaatggagtaaccagtggcaactcttgcttttgccttccaaaaatagaatcttaaaaaaaaatttttaagtcagttttaaaatcaggtatttgattttttccaactgagttgtaggggttccttatatattttgaaagttaacccatttaacccattatcagatatatgatttgaatttttttccctctcattccatagatttcctattcattttgttagtattccaatagaaaattttgccctcctccattcttacattattggttatactaataaattaatctcattatgaagcagattgttgcttctttatgcttgctgaaggcatctggaaagaaccctattagacactgtgaactttgatatttcaaacaatggacccttgaattgaatcctctgaggtgttattcttttgtcaactttcagactgtaccagtggcttgaggcaggatttccaagactctttttagttcagaagcaaacatacttccttaaaaaagaatgcttgacacaagatcaaacaaaagaagaattactaggactgaaaaaaaactgagaaaaaaattaaattgtgattacttttttggaatatggtaggcattattttaattacgtttttaataaatacgaaaaaagtcctttctctttctttttatacaatatgtaactcttaatttagaagattttacatctgtgggttgaattaaacatttttaaatgatacctgatttttgtggactccattagaattcagaaaaaaagaatacttttactgagtctccttacttttcatggcatgtagttatttacattatttaataaaaatctgttttccttttaacctrtatataattggatacatcgatacagttatattaaagtataccttgtgtgttagtatttgaaaatactcatttaatcaggcatgataagcccattatgagaggacttcagaaagtcctaggtatcctaaatatatatgtacccaatacaggagcacccaaatacataaagcaagctcttacagacctatgaagagacatagattccaacacaataatagcagtagacttcaatagagcattgacagtattagatcactgaggcagaaaactaacagagatattcaggacctgaacttgacgcttgaccaaatggacctaatagacatctacagaactccctaccccaaaacaacagaatatatattcttctcattgccacatggcaaatattctgaaactgtccacaaaattggataaaagaatcctcagcaaatccagagaagccaaaatcatactaaacacagtctcagaccacagtgcaataaaaatagaaatcaatactaagaagatcccttaaatccatacaattacatggaaagtaaataacatgccctgaatggcttttgggtaaacaatgaaattaaagcagaaatcaagaaattctttgaaacgaatgagaacaaagatagaaaataccagaatatcggagacacgtctaaagcagtgttaagagggaagtttataaggctaaacattcacatcaaaaagttacaagatctcaaagtaacaacctagcatcatatctagaggaactagagatataagagtaaaccaaccccaaagctagcaggagaaatgaaataaccaaaatcagaatttaaatggaggaagttaagatgcaaaataaataaataaataaatacaaaagatcaatgaattgaggagtggatttttgaaaggatagataaggttgatagaacactagatagactaataaagaaaaaaagagagaagatccaaataagtacaatcagaaatgaaaatgagaatttaccaccaactccacagaaatgcaaaagaacctcagatactactaaggacacctctgtgcaaacaaactagaaaacctataagaaatggataaattcctgaaagcattcaacctcccaagactgaaccaagaagagactgaatccctgaacagagctataataatttctgatattgaatcagtaataaaatgcctaccaaccagaaaaagcccaagaccagattcacagccaaattctaccagatacataaagaagagatggtaccattcctattgaaattacttccaaaagttgaggaggaaggactcctccctaaatcattctatgaggctagcattatcttgataccaaaacctgacagagacagaacaaaaaaagaaaactttaggccaatacactcaatgtacatagatgcaaaaatcctcaacaaaatattagcaaaccgaatccagcagcacatcaaaaagctaattcattgtcagatgtatagattgtgaagattttctcccactccgtgggttgtctgtttactctgctgactgttctttttgccatgtaaaagttctttagtttaattaagtcccacctatttatctttgtttttattgcatttgcttttgagtttttggtcttgaaatccttgcctaagccaaaatctagaagggtttttctgatgttatcttctagaatttttatggtttcaggacttagatttaagtccttgatccaccttgagttgatttttgcataaggtgagagatggggatccagtttcattctcgtacatatggcttgccaattatcccagcactatttgttaaataaaatgtccttttcccattttatatttttgtttgctttgtcaaagatcagttggctgtaaatagttgggtttatttctaggttccctattctgttccattagtctatatgcctatttttatatcagtaccatgctattttggtgactatggcctcatagtttagtttgaaatcaagtaatgtgatgcctccatagttttttgtttgtttgtttgtttgtttttatttgtttgtttttttaagtctttctttggctatgygggatccttttatgttccatatgaattttaggatttttttctagttctgtgaagaatgatgatgatattttgataacaacacaattcgcaattgcaaaattttggaaccagcccaaatgcccatcaatcaatgagtggataaagaaactgtggtatatatatgatagaatgctacttagccataaaaaggaatgtattaatggcattcacagcaacctggatgggactggagactattattctaagtgaagtgactcaggaatgraaaaccaaacattatatgttctcgctcataagtgagagctaagctatgagcatgcaaaggcataaaaatgatacagtggactttggggacttgtgaggaaagggtgggaaatgggtgagggataaaagactacaaactgggttcggtgtattctggttgtgaggctggaaaatagggtctggaggcagggaacataaggctgattcacacttcagctataacaggaaatatcctctctataaggcgtaggccaagtaaatgactttgtaactttacttcatcttcttcatttacatagggtgtaccccaagtagagggtatttaaactcccaaaagttctgtaatggagcctttgtgtccctatgctcagtcccgctcttacaccgtggaatgtactttcattttcaataaaacccttcattccttccttgctttgttagtgagttttgtccaattctttgttcaagacaccaagaaccttgratactctctaccgctaacatttgtgtgatgggtgcaccaaaatctcacaaatcaccactaaataacttactcatgtaactgaacaccacctgttcaccaaaatcctatggaaataaaaataaataaataaatgcatgccaaaaaaaagctaatccaccattatcaagtgggctttattcttggttcaacatgcataaatcaataaatgttatttaccacataaacagaatgccgaactgaaaaaccacatgatcacctcaatagacgcagaaagggctttcaataaaaatcaaaattctttcatgttaaaaacccacaaaatctaggcattgaatgaacatacttcaaaataataaaaaccatgtattaaaaacacacagccaacatcatactgaatgggcaaaagctggaagcattcctcttgaaaactgggatgagacaaagatgccttctcttaccactcctaattcaacatagtactggaattcttagccagcacaatcaggcaagagaaagaaataaaaggcatccaaataggaagagaggaagttaagctctccctgtttgcgartgatatgattctatatctagaaaacctcatcatctctgccgaaaagctccttgatctgataaacaactgatacccaaagcaatcctaagcaaaaagaacatagcgggagacatcatagtccccaatttcaaactatactacagggctacagtaaccaaaacagcgtggtcctggtacaaaaacagacttccagaccaatggaacaaaatggagagcccagaaataatgccacacacctacaaccatctaatctttgacaacgttgacaaaagcaagcaagggggaaaggactctattcaataaatggtgctggaataactggctagccatacgcagaagattgaacytggacctcttgcttacaccatatgcaaaaatcaaatcaagatggattaaagacctaaatgtaaaacctaaaactataaaatcctggaagataacctagaaaatacytttctggscataggcccttrtaaagatttcatgatggagatgttaaaagcaattgcaacaaaatcaaaaattgacaagtgggacctaattagactaaggagcatctgcacagcaaaagaaactatcaacagaggaaacagtcaacctacaaaacagaaaatatttgcaaactatgcatctgacaaaggtctaatatccagcatctataaggaacttgcttaagaaattaacaagcaagaaacaaagaacaccataaaaatgtgggcaaaggacaggaacagacacttctcaaaagaaaacattcatgtggccaataagcttatgaaaaaatattcgacatcactaatcgttagagaaatgcaaatcaaaaccacattgagatactatctcacaccagtcagaatggctattagatggtggcaatgtcatagagaaaaaggaatgcttatacactgctggtgggaatgtaatttagttcacctactgtggagagcaatttggtgatttctcaaagatcttaaaatggaattaccatctgacccagaaatcccattattgggtatatacccaaaggaatataaatcattctaccrtaaaggcacatacatgcagttcattgcagcattattcacaatagctaagccatggaatcaatctaaatgcccaccaatggtagactggataaagaaaacatgccacatatacactatggaatactacacagccrtaagaaagaatgagatcacgtcctttgcagcaaaattgatggagctggagaccatcatcctaagcaaactaacacagggacagaaaaccaaatactgtatgttctcacttattagtggtagctacacattgagtacacgtggacataaggaaggaaacaacagatgccagggcctacttgcacgtggagaatggaagagtgaggattgaaaaactacctattgggtactatgctttttacgtgggtgataaaataattatacaccaagcccccatgacacacaatttatctatatagcaaacctgcacatgtacccttgaacctaaaatacaagttaaaaaagaacaatttttggtgaggggagactctgaaaaaaagtatcagaaactcaaaaataaggtaaaatgatggtagtacattctttcaatactattttggggtaagggtcacttaagtattatctaggggaatatccttagttcatctcattatttatcataaagattccaaacttactaaagttactttttgacttttatcaagtaccagtataaatcatttctgtccaatggaatagaaacctaagatttttaccatattgtaacattaaccagttttatacataacatgtcattcttatcctaacagattttttgtttgtttgtttgtttaattgtatgcaaatatgttagttttttaatatgctctttgaattggtaataacatcctactggttatttctttgacatgtgtgttgtttttacatttgcctaagaatcatggttttatccttttcaaattatgtttttaccaaaaatttgtcaaaatagacagttaccatagttggccaggtgcggtggctcacgcctgtaattctagcactttgggaggccaaggtgggcagattgcctgaggtcaggagttcaagaccagcctgacctcgtctctactgaaaatataaaactagccgggggtggtgatgtgtgcctgtaatccaggtatttggggtgctgaggcaggagaatctcttgaacccgggaggcggaggttgcagtgagctgagatcgtgccgttgcactccagcctgggcaacaagggcaaaactatgtctcaaaaaaaaaaaagaaagaaagaaagaaagaaagaaagaaagttaccacagttaataatacttacctatgagcctcagtatgaattataaaatattttatagaaaagtactctttatacaatttgacaaaggcattctcttttattttcaatattttacttttttatgcctgctacaaagaagcaatttaagttttcattcagctgctctgtgatgtggaaagagtatttttgggccaagtgttattcaagtgtactgatgatgaaagtcttttgttaatatatgaacagactttgagtaatcagagatcgtttactggaaatgacaagtttcatcttgtctgattaagtacacattaaatcttggcacagaytttcttaggcaaaactttgctcaacartaatttgaatccacatagaacccttgcctttagtaccttgaatattctttgttattgcattaattcccattcctaaattttacaagatgtctgagactattaagtaaaatgcataaagatatttctcatattattgctgtttaagtgactcctttacgttttaaaaattcctaagaaaggtcttttacaatacttctactttgcattaaataataatcaaacctcgccttgggggtgtgccagacagattaaaatgaataaatcaacacttcacccaaacattcattcatagacttgcttttttttttttttttttttgagacrgagtctcaatctgtcacccaggctggagtgcagtggcatgatctcagctcactgaaagctctgcctcccgggttcacgccattctcctgcctcagcctcccgagtagctgggactacaggcgcccrccaccacgcccggctaattttttgttgtatttttggtagagatggggtttcaccgtcttagccaggatggtctccatatcctgtccttgtgatccgcccrcctcggcctcccaaagtgctgggattacaggcatgagccaccacgcccggccagatttgcttttttattataaatcatcttttaattttccttattaacacagaaataaacaagaaaattcttcctggagaactttaagaacacaaagagatgtgtcttttctgagatamgctctaagcatgacagaggtctagaaatggaaagctgaaccccacgtctcagattttattatttattatctggtttttttttttgaaatagagatgaggtctcactatgttgccctggttggactccagctcctgggcttgaacaatcctccaccctcagcctcttgagtagctggaactataagtgtaagaccactgcactgggccagattttaatatttgtttgcttattttaaattatatgagatattttcttgtcttttttttttttttttttgagatggagtcttactttgttgccaggctggagtgcagtgatgtgatctcggctcattgcaacctccgcctcctgggttcaagtgattctcctgcctcagcctcctgagtagctggaaatacaggtgtgcaccaccacacccagctaattttcgtatttttaatagagacgaggtttcaccacattggtcaggatggtctcgatctcttgacctcatggtccacctgcctcgacatcccaaagtgctgggattacaggcataaaccaccacgcccagccaagacattttcattgttaagttaaactctgtggaaatatgtaaaacatgtattcttcctccacccaaccatctggatctgcttaaaagacaattaaaaatttgctaagtaaacttggccaacgaatgaaaagatactattttaattggagattatagtagttttctaggactgccataacaaaatactgcaaagtgggcggcttaacacaacatacatttattctctgttggttgtggaggctcacagtccaaaatcaaggtattggtagggtcatgatcccacagaacgctctagggagaatctgccccatgcctttctcttagcttctggtgttgtgagcaatccttagtgttcctgtgtttgcccccatcatcacacagagttttccttgtggtctgtctgcatcacctttcctctgtacacgtatcatttcttcttacaggacaccagtcctaccggattagggacccacactactccagtatgactttatcttaacttacatcttaattacaactccacggaccctatttccaaataaagcgacattcgcaggtaccaggcgttaggacttcaacatatcttttttggggacacaaatcaaactacaacaaagatcatttgtatttacctttctgataattgttaacagttccttttgcaagatagaggccatgatttcccatgtagagctcactgaatgtataaaatgtactttcaaacaagttttgctcaaagtcccaataaataaccatttttttccttctcatttatttgactttgggaaaatatcaaaatcttcttccttaaagtgtttgtgaaacattaagcaactcaaaccaggttcgagtcaaaatgatttttctagctcatgtttcctactggtgtgtgctaacaccttagtgttactccatttctcctctaattccctacctacaggaatacgctyactcaggcactgacacacttaatcacccctttgttttaatgagtgcctacaacyttcccagcactgtgttgggtgaacaggctgcacagacatgattaagatacaggtttggctttcaaagaggtatgagtatatggatgagaggaaaataaatcatttttttcttttttaaaattattatactttaagttccagggtacatgtgcacaatgtgcaggattgttacatatgtatacacgtgccgtgttggtgtgctgcacccattaactcgtcatttacattaggtatttctcttaatgctatccctcccccatccctccaccccgcgacaggccccagtgtgtgatgttccccatccaagtgttctcattgttcaattcccacctatgagtgagaacatgcggtgtttggttttctgtccttgtgatagttttgctcagaatgatggtttccmgcttcatccatgttgctacaaaggacatgaactcatcattttttatggctgaatagtattccatggtgtatatgtgccacattttcttaatccagtctatcattgatgaacatttgggttggttccaagtctttgctattgtgaatagtgccacaataagcatacatgtgcatgagtctttctagcagcatgatttataatcctttgggtatatatccagtaatgggatcgctgagtcaaatggtatttctagttctagatccttgaggaatcgccacactgtcttcacaatggttgaactggtttacagtcccaccaacagtgtaaaagcgttcctatttctccacatcctctccagcacctgttgtttcctgactttttaacgatcgccattctaactggtgtgagatggtatctgctgtttggcactatgcttcttggacacaccaatgtatctcaggatttacttgtctgtaaaggattttatttctccttcacttttgaggcttagtttggctggatatgaaattctgggttgaaaattcttttctttaagaatgttgaatattggcccccactgtcttctggcttttagggtttctgctgagagatccactgttagtctgatgggcttccctttgtgggtaactcaacctttttctctggctgaccttagcatttttgccttcatttcaaccttggcgaatctgacaattttgtgtcttggcgttgctcttcttgaggagtatctttgtggtgttctctgtatttcctgtatttgaatgtcggcctgccttgctaggttgggtaagttctcctgtataatatcctgaagagtattttccaacttggttccattctccccatcaccttcaggtataccaatcaaacgtagatttggtctttttacatagtcccatatttcttggaggctttgttcatttctttttactcttttttctctaaacttctcttcttgcttcatttcattcatttgatcttcagtcactgataccctttcttccacttgatcgaatcggctactgaagcttgtgcatgcatcacgtagttctcatgccatggttttcagctccatcaggtcatttaagatcttctctaccctgtttagtctagttagtcatttatctaatcttttttcaaggtttttaactcccttgcgatgggctcaaacatcctcctttagcttggagaagtttgttactaccaacttgctgaagcctacttctgtgaactcatcaaagtcactctccatccagctttgttctgttgctggtgaggagctgtgatcttttggaggagaaggggcgctctggtttttagaattttcagcttttctgctctggtttctccccatctttgtggktttatctacctttggtctttgatgatggtgacctacagatggagtttttgtgtggatgtcctttttgttgatgttgatgctattccattctgtttgttagttttccttctaaccatcagtttcctgagctgcacgtctattggagtttgctggaggtccactccagaccctgtttgcctgggtatcatcagcagagsctgcagaacagcaaatattgctgtcygatccttcctctggaagcttcatctcagaggggcacctggctgtttgaggtgtcagtcagcccctactgggagggtctccaagtcaggctacacgggggtcagggacccacttgaaggggcagtgtgtccattctcagagctcaaacaccatgctgggagaaccactgctctcttcagagctgtcagacagggatgtttaagtctgcagaagtttctgctgccttttgttcagctatgccctgcccacagaggtggagtctacagaggcaggcaggcctccttgagctgaggtgggctccacccagtttgagcttcccggtcgccactgctttgtttacctactcaagcctcagcaatggcggatgccccttccccagccaggcttgctgccttgccattcaatctcggactagcagtaagcaaggctctgtgggtgtgggacccactgagccaggcatgggatataatctcctggtatgctgtttgctaagacctttggaaaagtgcagtgtttcggtggcagtgtcctgattttcccagtacagtctgtcacagcttcccttggctaggaaagggaaatcctcgacctgttgtgcttcccgggtgaggcgatgccctgccctgcttcggctcgccctctgtgggctgcacccactgtccaactagtcccagtgagatgaaccaggtacctcagttggaaatgcagaaatcacccgtcttctgatgactatccataatgcaaataggaactattatcttgcttaaaacctttcaatgacatccatcaacaaatgagaaatattgttctagtttttcactatcttgtgaaaatcgtttgcctccatgtatacgttgttttatttttcaacttatcctactatatatgtctatgaagctaatctttaacttggtacttcagtccaaaattagaaattaagtcagaattagaatttgcttcatgtgaattgaataaatataaaatgagtctgaatagggaagatgaaatgcaaaaaattgacacttgtgcttaaaacctttyatatattcataaccttaaaaccttttatacatttatatattcaatgcaattccaaacaatacctagttgactatggggataatgaacttaaaagattctagagttttaacttgaacaaataatgatcttagtaattgtattagtccattcttgcattgctataaagaaatacctgagattgrgtgatttataaagaaaggaggtttarttggctcacagttccayaggctgtccaagaagcatgatgctggcctctgctaggcttctggggaggcctccagaaacttacaatcatggcagaaggctaaaagggagcaaggcttctaacgtggtgggagcatgagcaaggtgtgggggaggtgctacacactgttagatgaccagaacttgctagaactctatcatgagaacaccaccaaggggatggtgctaacccattaatgagggattcacccccatgacctaatcaccccccaccagaccccacttccaattctggggattacaattcaacatgagatttggtgaggacacaaatcagtgatgcaaagaaaaagtgaaaacagagaaatgaaaagacatcagccacagtagtttttaaaacattttattaagctacagcaattcaaatattgtaatccttatgaaagaatagaccaggtactcaatggactagaatagaccattcagaaacaagccttagtatacgtgataatttgtgataaaggaggcatgttttattagcagggaaagattgagttggtcaatcaatattaatagggctattagaaagctacatggaaaaaaaagttaatttagatactttcttgctcaccacccaataaacaagaaaataatttgagatggaattaaatggaaaaatctgcagcaggacttttgcttccacacatgcaggatttcatcaccacaaaaactctctaatgctactcacggtcacacccatcccactcccgtactctctgtaacccctagtaaccacgaatttgtttttcgtctctataattctgtcatttaaggaatgttgtataaaagaaatcattcagattgtgaccttttgagattggctttttccccacacagcctaatgcttctgagatccacttaagtcgttgtgtatgtcagtcgtttgttcctcttcrttgtccagcagaactatgtcgtatggttgccaaaccattcatctactgatgaactttttgttgtttccaatgtttggaaaaactgttttctttttcctttttgtggtttaattgacatttttaaaaattccgctttaattcatctatagtgtttttgagtgtacctctttgtatagcttttctgtgatttaataaatgctagggagaatagattcatattcagaaaagtgaatatgatattgataaagaacaaaagaaaagrtagagttrtaaatgccataaatttattcaacatacaaattttgtgtatttccaatgatcttcccttctttctctcactgtcctctctattgatgagtctgttcttcatttctggagaagttcacccaatgagatccgtaagttgctgttttcaagcatttctttattcagattctaagtagtaaaagaaaagggagaaagggaaattatgtgacctacttaagaataattctttatatttcagttataaatacttgaacttagtaacttttaattatttttaatgatagggatgttctccgtgttttcatattttaaaatggagaagcaaaggtttcatggcaaattctatgtcaaagatgaaccctgtcaatcagcctaaaggaaggtcttatagaccacacctttcatgctgtgctatatggataattacagtgacaagttttttgactttagtatacacttagaaatatcctagaaaggctataggggatgaatatatcaccactgggtatagaatggaaactacatgttagataatttagtttttacatatgggaaattcttggattcatcttcaaacaagtcaccccagacaccagtaattgtatttaacttgcatttttttctgagaaattttataatacatttgatatagttcaatttatacatggtacatcagggtttttttaggatatggaaagggtacagtcttctcaagaagcagccttatgcagagaactgagatgcttatttattttgaagttgggattagactttactgtttaactgagatgcttatttattttctttcaagtggcattagattgaatcatttatactttaccagcactgcaaggggcattgtattcttcaaaggtgaattcatctgaaacacagaaattattggagagaaagagtgaagacattcaggcataagcacccaagatgtgaattgtaaataaactatgtaagctaagaaagaaagtagacagcatcgctatagaaccaataaaaatgacttctctattaagctatttgggattggtgggaggaaactaagagaaaatctggcttgggaacagaattgaaaggccgggtacacgggtggcatgcctaagaatagttacagtagttacaggactccgtagatagtaccttttcacagctgtgtttttctcattggaattgcaccttgctctctgaacctttccttaatcaaagaagaacagttttagcactaccatcatgctacaatggtggtaattttctagctcaaagccatgagcaaatcaaagtatttcctgattatcacaaagtttcccaaattgtgtgagactatccgaagcacaagtcaaaaacagatcaaatttttcatgtcacacatcagcactgagatgtgttttttcagttattgkactcttcttatctctttggagtaattcagcccaggacaaacaactttatagggaaatttagatagaagatagaatggaccctcttattgccttatggtcaatttataagaatgactctaacacttgtttagtggggggacatgagaggttaatatacaagaacatgattatccagtgcacacaaactcactttttcccccagtgaaacactgtggagttttgctttagttaaggcaatcctttactaggttagtagtctttttttttttttttttttttcatttcaaagctcagcatgtctgaatcttacctgtctcataataatcataggcttttactgtagctggttttaaattctttatttggatgtcttgttccacaaagaaggaaaaatgcagggtttgatgggttagctggagagacaggaaaacaattggaatcaaagattagttaatctttgattaactagttactagttactggccactcttcataagatattatcaaaccctgtagttatgctatatatctgtaccagaacctatgaaaagaaaggggaattctgtgacctgcataacatactcaatgacagataaaagaaggacaaaagagacattttgtagacagccaaatgtaatgaatcaagcctgttgacagtccaggcttcatttcttttttccttttcttttctcttcttttttttttttttttgtgggggggaccaagtctcgctctgtcgcctaggctagagtgcagtggcacgatctcggctcactgcaacctctgcctcccaggttcaagcgattctcctgcctcagcctctcaagtagctgggattacaggcacctgccaccgcccccagctaatttttgtatttttagtaaagatggggttccaccatcttggccaggctggtctcgaactcctgacctcatgatccacctgccttggcctcccaaagtgctgggattacaggtgtgagccactgtgcccggccggcttcatttctttttatagaacctctagttgttattccaaatctagcagagtcacagaaagtcttaccttttcaaagtagattgggacatggttggtgctcacttcagtcctctgaatctgaggctgtttctggagctgttgaccaagaggataagccagaaatatggaatgagaaaacttcatactggcagtagttttcaggtatttatgatataaacagcttctcaggagcatccaaactactaattttgatttcttcaagaataataatgaaaataacagtagcaatatttattgaacttttattctctatatatgctataagtgtatgtgcagatacatatatgtgatatatatatgcatgcacacacccatatatccttttctctttttatatatagctggaaaataattcaataccattccacataactaggtgtcttggggcctgttggaacattatttatcatgtttctgacttataccctatacttgacaccatataatcatgatacacactattaaaatgatagagacaccctctagagaagcaattttgagggagcacacctcttgaaaagtgcatcaataaagtcaaattgacacgataaatgccagcatttaccatggctttgctatttgtaagggatctagggattacctttttaactgatgctctcataggtatgaagcctgataccatcttcacatcaacaatgaccatgttggaactgggtcagtccccagtataactataaaatcaaagcataagaataaggaattcaaacaaaatttcttggaattcattcaagacaaactctctctttaccttctatttctaacactaagttactatgtctactgtatctgtttctgttattatggttgtttggaaaacccatcattttaagctcacactcttcagatattgtaataccatattatcaatgttaagtctttttcagaaaattttctcattaataaacactgcaagaattccatattcattatgtgtggctttggacagtggagtttctccacataagaaaatcaatttctccatattctattcggttggtgcaaaaggtctggtcatgatctaggacttacctaatgttgatgtgaatctggaacgttctgtgagcatccattccatcacaatttgtggggagagtattaacctgcagagcaaaaggtgttttcccttctttcttgggaaggatgttatatctcaggcatgtctaaaacaaatggaaaaaaaatccttaatttttacactgaacttgtctcataatctgttccagacgattcataccttcccttagcacacacttctttttcttattttgaaattcaaatataactcttgagactttctctcccatttgcagcatctcctaaaccccagcagtctcacctggaggtacacacatcctgaccctgacatggttgtgctgtactcccctggaacctctggcaactggacctcctgcagcactaggcagttgccatcatcaacttggaagtctttagaaaaggtgtctgaagacttgatggtgaccaaagctgctttctcacttttagtgaaagttgctgttccatatttggagagcgcttgaagagccaccactgtgtcctgaaaaaaaaaatgagtagagaaatcacagaagaggaaagtaacaaactcacactggatgtaaaccataacaacactattcttttttcagaattatttagtcataaatgcagtccactaactctatttcaattcagttcaatctggttagtaatgataaacyattctagatactttgaaggtatatttttaaaaagtttcttcattcagctagtttaaatagacatatggagataagacttagatatytgacacaagcccaggctatttcaataatttataaatttatgtaacaatatttgttataaaaggtcagagaagagagaagaaaatatgggttagaatagtaagagaagactgaagaaggttatctgagaaataagattatctctgaataatgagcagggtttatgtagacagaagagaggcatcgggggggggacctgggtggggaatgctctatatgaagtcatggaaactgcggtgagctaattccagaagaagcaaagggatctgcctaatcagattggtgcactcatgtttactggagagaggaaatatttttgataaaatattagataattttaggctttgagtgaaaaaaagatttattttctaagggaagtaatcccttgaaaatattgctttgtgaagacaaacctacctgcatggttggggggcccctagggagttaagagaggagagagtataaaaaggacagagcagtaatccatacataagatagtaaggctggaacttgtctgctgatggagggatggagaaagtgtgaattggaaatactaaccattccattattcaactcccagatggttgtgtcttcatatatgtgaatatatttatgtttccttctagagtcttcccacagacctgagtggaggagaagcccccttggggattttgctgcttggtaatccacttcacaatacgtgatgccacagacaggtcctctgaagatggggcaggctggacagtaagataggcaaggagcacataagatgtcatctctacttccacagagggagcccagggttgagaatagagggtcttagcttcgtgaagtttcccaggacgttgccagtggatcgaatcctctttgacatagaaaagggtagaatttttagcttaaaggatgatttcaaaatctaatccataagtgataattataattacagtttacctaataaattgacatttcattttaatgaagtgaaagcattaaacaaagtgaaagcattaaatagtcactatcaaacaaatctttatcaagaaagtaaagttccagggaataacattgagcctttgtgtctactacatgtgtgtgtgtgatattagaaggtgggactgtatagagtctatactgtgtggattaataaaatgatccatgttatccagagaattcgggtcttagatcaatgataattattctgtcattaaattaagatagcatggtaagcatgagctcggtagaggtattgtcccttcttttggtcactggtggttgtcagaagtaaactttgcagtagcagctcttaccttctttcatagcctctctgtttaatgattcaagcaactctcttcgcttgactttgtttcctgctagggcaaaggcataggccaataatgctttggtatagacaacacttccttgggcctctgaggtggagctccaggccgtttcaaggcaggatagggcactgcagaccactgcgtgctatgaagaagacgaaaggctattgtaaaacagcagaaccaggcaaatgagctattcccgggctaactgcagattaaaaaccttaatgtgcctgtataacctcacagttctgaccagagaggagtttcctctgctgcttccaaaaggatctggtcctttacattccagtgaaatgtaccaaaattaaataccataaaaatcacaattaatttccctcagggattcaccatattataattttattctttacgtgtgtgaaggaggtacagaggatgtgcttgaacatacagtggcaggcagaggcatctccagcaaagcaatggtgatgtaggcagagaatgtcacctcatcgttcaccccaccgtgtaaggatcagaggcagagagactcaaacacttcaacagtcatgagacagcatctgctaacacttcttttctttttgacatcttcactagagtgtttcttgtcttgtgctagattgtttcttgtcttgtgctagattgttgattttctccccttcctcctctaccctaaaattcttgagtctgtcccagatcaccttccctcactttttatagtatgttcggctttgaggtttttttgaacactattttcattcaataaaaaactactaaggtattgctagatttcaggagatttagagtccaccattcttcctgaaatctatgtcgctaagactgaaggactcaattcaaacatcatttcctcccacatatcactatcttcagggaccagaagaaaaacagagaaggcatcaccttaatggcattgttcagcagtgatccagagccttcgaaaaaaccatctgccttttgtccctgtgaaagccaggtgagggcatccctgatgtgtgagctctccacaaagatgtacgattgggcttgagcaaaggacttgagcacaaatgcagtgagcccgtcgagcaaaacagaaacacacacatgaggaccacctcactttcatagctcactttgtgcactgcctccagacattgctcttcacaattcagtggaggagattactgggaggtattgatggggaaatagtatttaagagctgaatatactctagtccaacaaacacctcaatatcttttattatatctcaactttattggtttctctgagttgatgctttttaatttttttgttgtgaaacatttgttggagcctccaagcctccccaccatgaaaactgcatttccagaatgacttgtcctgactttactgcatcacggtctccttctgtcctcgccctcccctccttctttaatgcacagtgtgggagcttcttcccctgtcattttatagaatgacattttctgctttatatttccatttagaagatccttatttcaccattttcagctgtgttatcacagcaggtaagctttcagagatgaaacggtgagattacccaacaggaatgatacatacagcatatgcgttatttaaagactaacaattttccacaaaaaactccagatattagagagtagctgtttctagaatcctgaaatgtcatggatctacagagagcatagggaaaaaataatcttgtttccctgactgctaccatcattgtccccaaaggtgctgtaggaaccatctctgtgcttataattcaattgcctttggtaccctgaagaggaagtgttcatagatttattgaaatggcaaagacattggaggattattgagcttttttctcagtgctattaggaatcatagggtaactaatatttagttaaaatttcccgcaacccccaatcacaggcttgatgatactattgaattttctacttgtatattgggacattttattgaaaatcacgacaatgactatcgaatcttaatgaaacagatgttgattttcgttcaccaaaaaatatttaagagattatggctcttctttttgaggtaatctctcaccactgatgaggtagctagtggctttggccttgatcttctctgtcagctgtcgtgtctcatttagatagtttagaacataaatgttagggacaaaaaggaccatattctgctctccacaaccatagggcatctgaagaaggttctgaaggttttgcactacagagcctagtatatcacctgtggaataaaagttgtaaagaaatcagatatggtttgtattaggctaggaaaatagattattagctaactgagaggccaaataacctatagagaaaaggacaagaagactaaaaaaggtgaaaaaacaagaaatagggaggaaaacaaaaggtgagaaaatagacggtttaaggatggagaaaggggggaagaaactgaatggtaggtgatctatcttttctcatgggccacatgtctggtaaaactcaaccacaaccattttcaaactgactaggaagcattaccacctagtaaattgcttgaagatgagggcactgagaggtgaccctttctttttagaatatatcaaggcataatatgtagcacaacatctattcaagcccctttccaactgtaacatagtgtaacccttagtgctttctctcaatccattgcctgttgtcagaaacttcattaatcgtggatggtgaggcccatgcactagaattatacagccagacagctgcttcccttgggctgaaagaatcacctaaaactgaatatgttgcccttggagatccttcaaccacatttgaaggaacattcagtgacaccttttcaggtactccagtatctaatgaaagaagaaaaacacacatataaaggaggggaaagtgagagaaatgttctatttttgttatgaatcatgtttctctacatcatctagatccaaccttttattttccttcgtcattatataactttttttttttttttttttttgtgatagagtctccctctgtcacccaggctgaagaacagtggcgtgatctcactgcaacctctgcttcccaggttcaaatgattcttgtgcctcagccacctaagtatctgggattacaggcatgcaccaccacacctggctaatttctgtattttttatagagacagagttggccaggctggtcttgaacttctgatctcaagcgatttgcctgcctccatctccccaactgctgagattacaggtgtgagtcaccatgcctggctcagttattacataatttctttgatacaatccaagtttcccttaaagccatgattcatctctcagtgaaattcatattcatcatatacatttgtgctaaatttctatggcttttcctatgggcatatacttatggtatgcttatttccttctcttcatggtttatattaattcctgctactgttagtgcttttcaagaattacattcattccattcatttgtattcagtgtatactatgtaccaggttctaagtgcaatgataccgaaagtttcaaaacaaatttcctggcctcctggagatttcatttttaggggaagactacgataaaaaagcaagagtatatttagtatactagatgttgataagtgctatagagaaaattaaagcagggcaagtgtttctatggtgagctagtaaaacaaggcaggtcaggaagtggggagggggctccctatggaaaagctcattgataaaaagtcctgtgtgagcagagactttaagtaagtcaaggagccagatttatccaaacctgggggaagatacttccaggaaaaaggaacaaaaagtaaaaggactccagagactgaagcatgctgggtgtattccaataggaagaaagaggtcagtgtggccggaacgggttaagcgaaggagagattaggaagacgtgaagtcatggggtagcaagggtttctaagtggcattaaaaacttacgctttaacttaggggggatatgggagattcctgaaagggttagagaagaggagggacacgatctgacacatsttttaaaggatccctctcgctgaaggggaacaagaagagatgatcaggagaccagttagaaagctattgagagcctgcaagagaaaggactagaatagtagagatggagagaagtgggtagattctggatgcaatttgaaggtggaatcgactagatttgtgcatggattgggtagggaagataggggaaagaatgtagtaaagaactccaaagtgtttctccctagcaaatagaagaatggatttttcatcatctgagatgaaggaaattgagggaggagcaggtttgtgaggacgagcagatactcagtcttaaacttgctgattttgatatgcctatgagacctacaagcctgtaagtggagagtgggcagttgaatacatgagtttgagttcaggaaaaaggtgtggatcaaagttgtacagttttggacacaagtacatagttgttattaaagccattgactagatgattttatcaagggatcctcgtatagagaagagagatctgcagactgagcattatcgtcaagatgattataggtggcacagakttgggtttttaatgataatttaaataaacttaaaaaagtgttagcttttccccttctctttcaatatagtggtaatttttgtattgctatattaatgatattggtaaaatactggttttctatacaagttagtaacctggagttcctcttaaaataacttgtttaagtaaaaacatgagtgcatttaaactgtcaattgaacagtaaatcatactagtgtcacacagatatttcaatattttgaacatggtttaggaagacatttgagaaacacagaggtatcagaaagaatcctgtcctgaggtcaacagccttagaccttattattaggcaagagcttttaagcttttaagcaagtcttttatttctctatgcccatttctttattcttaaaatacaataataataatttatcctaaaaagtactttctatttatttccctaagaggctcattccaagtgattttcatcagaacaatgtttttcttttttttttctttttttttttgctagaacaactcagcaaaataaaattcctgtttattgttggacaacattgtttcacacatacatcaaacaggccaaaaaataaaaataaacagcaacttcatagacaaaaaaggaaaaaaaagaaaccttttatctttggcctttttaaccatctcatacaaaccaactacttatagtacagctaagtacatacacaaaaaagttactggaatgctcggaataagatggtttttctgttgtcatttttgcattttttacaagttttttttttctcctttgagatyataatgaacatggccacaccacaagtaaagtgagaagtaggacagagaacgctccgaaggctggtttggtcatccgagatcattaaaaatggccgaccctaacaatatgtacaaaaatataaaatgtaaataaaaaatacaagtttcctttttaaastacttttaagaaaaaaaaaaagcagggccttggaagttttggttctttttccctcccctgttgcaaattctcatggtttgggttgggtggtggagagcgcgtgtcatctgcgggtggcactgcccacggtgggcgggcgggcctctctactcgaaggtgaccacgtttagattctgagacgggaagtggagggygaataggtcacggcggccttttttttttagtttaacttttccttttttgcygtctggtcatcctcgtcggtcttctgcttctgggtatcgacatcgtyatcctcatcatcttcagctgcccgcttgcccgtagctgactcagctccctcatcttcatctccrtcctcttcctcaccatcaccttcttcctccccaccttcttcctcttcttcatctacctcgttgtcagcctccggctccccattttcctcattagcattccygtkagcaggggcgtctcttccattttccgcctcttccacaacttccttcttctcctttaagtcctcggtggtgatttcggagctggtgtctacggctgcgtctgacatggtggggcacgccggtgacgcgatgcaggggataaaaaagaaagcgasagttcagggactctggcgataaagctgccggagtccgcggcggcggaggcggctgcggcgagcaaggaggctgacgasgcacaatgcaaagacggcttttcagagcagccagtggggcaggacaatgtttttcatcaaatgtccttagatttggaggagggtaagagttgttttttttttctctctctctctcagagaaaagcatgcccccaaaagacattccacaactgcatactctggcaagtcacttaacatgaaatttttctctatatattacacttacctgatgcacagggcagcgtgttgaaagtttcctcctttgctattccttcaggctttatattgacaaaaaaaaaaaaaaaagtaaagcgatactgaatgtataaaagaaaaattaaacacttgaaagcaaaggagaaaatggtggtgaaaaattggattgtagatctatccacattcttgggaattaaatgtcactgtgagatgcatgttagataatactgtatgaaataataagggctctgagactcacagagagtagacttacgtacctcaactagtaaggccttgactacagtgtccttctgcgcaagtggygggacgtcagtcaactcatygtcacacacttcctgagaatgcatggcttcygcagtggctgtgaaattcacctttcctggggaataaagttcttaagagttaaacggtgattctatattgaacagtttcttcttttccagtttccccagtgtatccagtggttgtcttcctcttgattartattaaaggaggagaaaaagtgtgtattggggtcrgtgcagaaaacaaatcatccaagcacacgaagtggaatttgctaatagcattactactcacccagtgacttcggagtcacaacccaggacacggttttccgcccatttctacagacacagtgagattcttcattcttctctgttggaacagccaggaaagcggaagagacctccagctgcacaacgacctgtcccccacacccaaccacaagtttatgaagggatgcagaacagcatgaatactgcaaaagatgctctgtgcatcaggtaaatggacwgagggacaatgtccatgagtccagaggcgctgagaagctgtgcaaatatggtcagctctatcagacactttgtagtttaggtgtttgaaacaagaaaattgaaaaactgacaggaattaggataagtgtttaggatttagccttgtgccaacagaagaaagaggtgtttagtgaaaaacatgaaacaatcaggtggacataatgtctgaatttaggaatacacagatataggagcctgaatgaatataaccttaccaccttgggcctgtcaggtaccttttctcttagtaccaggtctgctccaaaattaggatatatcatatgcagttctgatttcctgggttacctaggagacctggtaatgaatggtgactatcttctattctcattcacttccagagaagtgtccttacccgaatgcaggtggacaagyagttaaacacagtggctttgagtgtgaaggcttctcctcgcaccacagaataaggaagggtgagttctaggaagaaaggctggaaggcttgaagagacacgataggagagaggccaaaccctgtggttccagacaagcagaatgcgctggccttccactctgtgatggtttcagggacctggtcaccagctcacttatacctaatgagctagtgaaggagcagagaagaggagtataagcaaatcttttttttttttttttttaacacaaagcatggctgatcctagaacatgataactcagtaacctagtgtggtaaatgctaaacttgatctaagggttggtgctcctggtgaggtttaaagttttttttctccctacctcccttactcccyccttccctccctccctttatttcttcctcttttctttcattctttccttccttttgttctttctttcaatctccctcccctccccttccctttcctttatttaagagggctggtagcatcctactttctaytatyttagttatcaatagactaaattagaaaaaaaattagcattgtttaattatgagataaatgaactataaacctaaatatttaccagaaaagagcagagcagaactaaaaggatcaggaatccaggataacatcagtcatacagcaggattcaaaccctctcctaaactaaattccaggcaacacacaacttactcaactaccaccaaatcccagatccaggtctcagggaagtacttccggactatctctttcacttgcaatatctgaggttcttcttcgatcattgggtacattatttctacrgctcctgggggtacacctcgcagacctggtcctggaagacaacacacaggcctcagtgtgaacctcatttttatcatcaatttcttattgctgccttatttctcaaatggaataaggtcatacgctcagggaatgtttattattggaacaatttaacctaccagcttgttattttgttcactttcctataaaaaggctaatcctattttttcttyaaatagaatctagagctaaatatatttttctttataaataaaaacaaatgacctgtacatgtacctcctgaatctaaaataaaagttgattaaaaaaaaacaaatgtagctctctctaagatgattactcaactggtgaagggaaggataaagagtaatttaatacaccaaatattgcttttacactgaaattgtgttcacatgtcttctgtttgcagygagaatcaaacaagaggaatggatattagctaagcaagatgatttygggaatgattttttgtttgtttgtttgtttcgacattgaattaatatggagacataaacaataagcaacaggattcagtaaagtatgtagtatagacaatrgggagtcaggartgaaaagacaatcaactttagttaggccggaaaagactttaccaaagcggaacctaagatgatcattcatggatgggaggtggaggagaatggggagttattcccaggaaaggactgtgcaaatatatatacaaaggtggaagggtgcttcacagggatagtaaaaatttaccctctagagtagaatggctattttcaggktgtgtttcccataattaggtaaacagaaggtataatatataataaaacataaggctaggacaaatgaataaggtctgttaagtgggagttagttagcttgataaaaaagaaattgatattccagaaatcagaagatatacatatatataagatatatataatctttacatattgttaacattatcttaaatatctttattataatattattctataatatatcttctgatctctggggcatcactttttaaagataattatatacgtgtgtaattataaatacatatatgatatatatataagataatagagttagatgtgctctttcaaaaccttaaatgcaataatcttatgaattctggaagtattgactatgtttgagaaacaagtgacatgagaaaagcagtgtttaagagtatgcaggacagatagaggtaaagaaaagctggaggcaaggaagttaaattagaatggtttttcagtaatctagttatgaaataatgacagacagattaaagtgctgtaactgaaaatgagaaggaagaaaaggataagcaacaaataccaaaagaaaaatttgcatagaatattacagaacatttggggtcaaagtgtaacgatgtactctgagttttcaggttttctgaatcatacctttgtttccattgatctgttttctcttaggttggaaagaaaatacacacttggtgaaatgaaagtcaattaatcatgcttttcagtttcttttttttaaacaaacatgccattaaaggaatcatgattttttttttttcattttatggtcacaatacctcartgagtttggtgttgtcattctgacttcagatttaaagaaattgagcctctaaaaggttaagtgagtctgcaaatttccaaagtcacatagtcatagcagataggagtgtgatgaaaaattgtccctttgttcttaacacagtgttcttttttcactatacaggattttttttttttctggtgaggaaatatccttaatgactcctttgttttcaattagaacattactccttgccttcccaggcagtgaatctgctgtattaaaatgtgtttattctttttttttttttttaacactttttactgccatcctcattttttattaaaaagtaaatttggtagacattcaagcatgcagagaaaaatttctctaggcctgatggcagtagaaaagaattttgagttaggccttttgcaacatttcctgatttccaggtatacttgaaacacacaaagagactatgcagaggtagcrtatctgccaaaagttgcrttactctcttttgctcaatattacataaatcccttctctttccataagaagatatgacagagacagttaatatccacatgagccttcccatttctcagcctcctttgcattcagggcaggaacatgggcggaagtgatgtataccattcccactcctggctttaagagtcwagtgcaacctccttccccatgggtatgaccttgaaagccacgttggcgatggcagagtcaccagaggaaagcagactggttctctctgactcactgtttggcacggggctgttctggagagtgtctgaactcacaagtagattttgtgtgagcaaaaaccaaaccrttaggtgcttacccgctgagatgtgggagtttgtttgttactgccattgaatctaattctgactaattcaggtattgactccatcatggacaaggaagatctaaaatggcaagactattaaaagcaaaaacaaaaaggtagttgattttgatgtcaaagagaaaataataattgcttaaaaatcctctatttgaggaaaaagtattatttggggctaacttaccaagaagttgctgcagtctcaagatccaatacttagaaaaacaggttttcatcttaaaccaacccaataaagcaccatttttcttctattctgtcagacaaataaatcacacctttacctcctattatgctgatacgcaatcctcgtggtagacacaaagttggcttatggatttttgagttggtaaaaatatctaatcctatggactgaaaaaarttgttaaagcatagcggcaatccaatcttgagactgtaagtagtttcttgaatttgtattgtactttcactattatgttacatatagttcatacgctcatcatgaaaattacacaaaatgaggagagctatttataaatatgaaaacagagtcatagamggtcaagttcattaagctattgagtgaataggagtgggaattcaaacccgtttctgattcttatttctaaatattgtctggtataatctaatgctccttaactcttttttgcatccataaaactgaatattttagacttagatgttttcttctcttctttttccccatgaaacaaatatctatgtctgtgtatgcatataaacagctctccttatggctttattacaaagagcatttttttgcttgtttcttgtcattttaaattgaaggtttgcatatcggaggttgttctttacaatcttagtaaactctgttttgtttatgttttaccagaagatatggcttttcctgaatatctatgcttaactcgttcctgtggtcctttcctcttttttctcagtttcttytagtcgtctcaaatgtctgcatctaaaacccacattcagatgcccacggttgtctacagtccacctgtttccagcttcccccttcttcaatgttagtcacagataaatattatttgctattttatctcagagtatttgggaaactgtgggactcttgaacacagttgtcagtgagggttgtgtacgcaacagaaagaaataaaccagaaataaatayttagagattaaacagctggttaataaaccaagaagtattcttttcatccttctaccatctgatttgtgattccagaasgtccagaagagagagatttaaattgctttcagctaagctgtagacctctagcagatgaacgacatattttcctgaaggtatgatgaaagtttttagtgctttttgatagtgataagatttaatttcacgacctggataattctgctcagttatagttaatactaaagaattacatttttaagacatcttaacatttctaatacaagttttgttaatcttttcttaatgaaagacaacttcaaattttcctggaattttactgccctgtgaggactgaagttttgcattttatgtattcaatcctgtattcattcaacaagtgttttctttgtttgtttgtttgttttgttttgttttgttgtttttctttgagacagagtctcgctctgtcacccaggctggagagcagtggcgcaatctcggctcactgcaagctccgcctccggggttcacgccattctcctgcctcagcctcccgagtagctgggactacaggcgccygccaccacacccggctaattttttttatatttttagtagagacggggtttcaccttgttagccagaatggtctcgatctcctgatctcgtgatccacccacctcagcctcccaaagtgctgggattacaggcgtgagccaccgcgccccgcctcattcaacaagtgtttatggtgcaaatgactgagatgatggcctccaacaaggtgctcacctttccaagagtgtcagacacattatggaaaatattttgttttggttttcttacatattggaatccccaagagtcactgagaggggaatacgatggtggtaagcagytttgggatccatttggttaaggtttgcagcctaaaagtaaaccactttctatttaaggtggtagagaagttcatgtgtgaacatctgtgtgtccacagagttatctgtctctgagatttcaatatttttctgttagttatcattttgttagagggaggggagaaaagatcctagagcttagaagtccattgtttctccatctaaacagacacgtagaaatcagtttttgttatgtttttggggaaaaaaaattaccgtgaagatactgtaaatgtcatccccctccaggacttgcttcggtgtggaagtgattccgctgtgagttgtgtcttttgcgttgttgcactcttcatcatattcatccgcaggacctccagctctaaaggtaaatggactctttactggtagcaagttatagacctgcaacatggagagaacaaaggaaatctctttctttttaacagattttaaaatgtgataatgtcccttaggaaatttaaaagattatggtgtttatttaacatgtgcwtgcttacattatgaaaagcaacacagagaatcatggagtaatatcaraggtcatggatcctaattcttttgttgtgcaaaagaaagtaatatatagagagatgaaatgaattgatcaaaatctcaaaattcattttggttgagtaaaaataaaaccgtctctatttcccacaaaaaaaaatgcctacttttaaaaraaagtaggaaatgtggacagcagaggcacataatgaaagaataaaagcctctcacagccccctcacctaaaataatccccataaatacttgattcatttcctttttccatttcatatgactaaggctgtaccaagttttctttttagtctactgtattaggaccaagtttagcttaagaaaaatctaggtgcagggacaactgagaaataattcaattccagtttggttttgcccagagccaagtttaaggccatgtgctcagggttcaggtggccttactatacagtgttcaggccattaaacacacctgcagaccttctaatgtggcttctgtcacttgtcatctgtgctactgtaataacttcgtaactgttcttgtgctttcattcttgctcccatactcttagcagcaaatatgatctttttaatagattcatctcaattgtccactcttctgtgtaaatttcctcattgatttaccattgcatttactatcaactccaaactccacaccaagtaaacagagctcgccatgatcttccgttttccatcctacctgcagcctctatcatcctcccctctcactgctacatattaggtgatgaccttttccttttcagtacactccaaattcattctgactcaaaacctttggcaygctgcttccattttttgtaagcttgctctggcctctccactattctccaatgtaaacatttcaaaattgctcaattatttcaaaaatttatcagcacctttatgcttgatatcaatactccgtttattcttttcatagtatttataaaaatctggaattattatatgtttatatgtttttgttgcttgcttgtttgtttgtatatctcacaagattataaatcaaaactagtaaaagaccaaatctggattgtccataattaataatcctggtctcaaaacaatgtccatcttatagtcaagatgcaataaatatttcttaaataaataagtgaaccatgaagccaataaaatatagggctgttctgaaattgcttcattgcaagagacatttttaaagacaacattgaatggaaattctcttttgtccacacttaaaaccagtgagtgagtgtctggattttaagaaaggcataaaatttttgcataatttcttgaaattatattagtggtgggttaggaagtggatttaaaagaaaagaaatgagaatggaattcctcctttaaaatgtattgtttttatcgtcaatttcttatagttgccttatttctcaagtggaataggttatatgctcagggaatgtttattattggaacaatttaacctaccagcttgttattttgttcactttcctgtagaaaggctaaccctatttttaatgtctcctggttgtgttttcttcattcataatattaaagtaataatacccatctcaaataattattattcatttactcactcattaaaaatgtgttgatcatctattgtacataagattctgtgctaggcaagatgatggagtcacgacctatcagtatgctgtcttcaagagatccacctcatgtgtaaagacacacataggctaaaaataaaggaatggtggaaaatttaccaagcaaataggaaacaaaaaaaagaataggtcataatcctagtttctaataaagcaaactttaaaccaacaaagatgaaaaaagacaaagaagggcattacataatggtaaagggttcaactcaacaagaagagctaactacctaaatatatatacaaccaatacaggagcacccagcttcataaagcaagttcttagakaattacaaagagacttaggcgcccacacaataatagtgggagactttaacactccactgacaatattaaacagatcatcaagacagaaaattaacaaagatattcaggacctgaactcagctctggatcaagtgggcctgatagatatctacagaactctctgtcaaaaaaaaaaaaaaacccaaaatatatattcttctcatcaccacattgcacttactctaaaattgatcacataattggaagtaaaacactcctcaacaaatgcaaaagaactgaaataataacaaagagtctctcagaccacagtgcaatcaaattagaactcaagattaaaaactcactcaaaaccacacaatgacatgcaaatggaataacctgctcctgaatgactcctgggtaaataatgaaattaaggtagaaatcaagaagctctttgaaactaataagaacaaacagacaacataacagaatctctgggatgcagctgaagcagtgtgaagagggaaatttgtaacactaaacacccgcatcaaaaagctagaaagatctcaaatcagcaaactaatatcacaagtaaaggaacaagagaaccaagagcaaacaaaccccaaagctagcagaagccaagaaataaccaaaatcagagaagaactgaaggaggtggagacacaaaaacccttcaaaaaataaatgaatccaccattgaccccacagaaatgcaaacaaccattagagaatactataaactcctctatgcacataaactagaaaatcaagaagaaatggataagttcctggactcatacaccctcccaagactgaaccaggaagaagttgagtctctgaatagaccaatamtgatttcagaaactgaggcattaataaatagcctaccaaccaaaattccaggactagacaaatttacagatgaatgttaccagaggtacaaagaagagctgataccacttctaatgaaactattctaaaagattgaaaaggaggggctcctccctaactcrttttataaggccagcatcatcctgataccaaaacctggcaaagatacaacaaaaaaagaaaacttcaggccaacatccgtgatgaacatygaagcaaaaatcytccataaaatgctggcaaaccaaatccagcagcacatcaaaaaacttatccaccacaattatgttggcttcatccctgagatgcaaggttggttcaatgtaygcaaatcaagaaatgcaattcatcacataaacagagctaaagacaaacccacatgattatctcaatagactcagaaaaagcctagaataaaattcaacatcccgttgtgttaaaactctcaatgaactaggtattgaaggaacacacctcaaaataataagagccctttatgacaaacccacagccaatatcatactgaatgggcaaaagctggaagcattcccctggaaaacctgcacaagaccaggatgccctctctcaccactcttattcaacacagaattggaagttctgagtagggcaatcaggcaaacaaaataaataaagggtattcaaataggaagagaggaagtcatattatctttgttgacagatgacatgatcctatatctrgaaaaccccatcatctcagcccaaaagcttcttaagttgataagcaactttagcaaagtctcaggatacaaattcaaggtgcaaaaatcactagcattcctatacaccaacaacagacaagcagagccaaatcatgaaagaactcccattcacaattgctacaaagagaataaaatacctgagaatacagctaacaagggaagtgaagaacttcttcaaggaaaactgcaaaccactgttcaagaattcatgaaggacacaaacaaatggaaaaacatctcatgctcacgaataggaagaatcaatattgtgaaactggccatattgcccaaagaaatttatagattcaatgctattcccattaaactaccattgacagctttcacagaattagaaaaaactattttaaaaatcatgtggaaccaaaagagagcccaaatagctaagacaatcctaagcaaaaagaacatagctggagacatcatgctacctgacttcaaactttactacaaggctacagtaaccagaacagcatggtactggcgcaagaacagacacgtagaccaatgcaacagaatagagaactcagaaataacactacacatctacaaccatctcatcttcaacaaacctgacaaaaacaagcaacggggaaaggattccctatttaataaatgattctgggagtgctggctagccatatgcagaaaattgaaacttggacccctttcttacaccttatacaaaaattaactcaagatggattaaagatgtaaatgtaaaacttgaaactataaaaaccctagaagaaaatctaggcaataccatttagggcataggcatgggcaaagattttgtgacaaaatctccaaaagcaattgcaacaacaacaaaaaattgacacttgggacttcattaaactaaagggcttctgcacagagtatcagagtgaatagtcaacctacagaatgagagaaaatatttgcaatctattcatttgacaaagatcaaacatccagtgtctacaaggaacttaaacaaatttacaagaacaaaacaaacaacccccttaaaaagtgggcaaaggacatgagcagacacttctcaaaagaagatattcattcagccaacaaactgatgaaaaaaagctcaattttactgatcattagagaaatgcaaatcaaaaccacaatgagataccatctcacaccagtcagaatggtggttattaaaaaggcaagaaacaacagatgctggcgaggttggggagaaaaagcacacttttacaaagttggtgggagtgcaaattagttcaaccattgtggaaaacagtgtggcgattcctcaaagatctagaagcagaaataccatttgatccagcaatctcattactgggtatatacccaaaggaatagaaatcattctattataaatgttcattgcagcactattcacaatagcaaggacatggaatcaacctaaatgcccatcagtgatagactggataaagaaaatgaggtacatatacaccatggaatactatgcagccataaaaaatgagatcatgttctttgcagggacatggatggagctggcagccattatcctcagcaaactaacgctggaacggaaaatcaaacactgaatgttctcacttataagtgggagctgaatgctraaaacacatgaacacatggtggggaacaacacacactggggcctgttggggtgggggcagggggagagagagcatcaggaagaatagctaaaggatgctgggcttaatacctaggtgatgggttgatctgtgcagyaaaccaccatggcaaatgtttacctatgtaacaaacctgtacatctggcacatgtaccccagaacttaaaataaaagttaaaaaaaaaaaaagattctgtgccaggcatggcacagattgtcttggtaagcaagattgctcccttaaggagaatataacagagaatacaatgagwtaaaatatgtaaagtactttatgcagtttctgcttgttgtggaattayactatgcctgttactctgaagaacttgttttttgcaaacatttttggaacttttaacytccaaaaatgatcttatcacgtgagcatttcatgatctccaaggttggaacgkgastcayagatttaggtgasagctcagcttcaggcttcattagcagcacactctggtctacagcacggagggcacaaagggagaggggggtggctstcaccttcaggygggtgtttgaggctggcaggctctgagctgaggagaatctcaaatttacctgtaaagaggatatgattaaagcagccattttataattattacagtaaccrgcccttcttctactccaggctaagagtagccttttctatacttcctttctctttattcatcttacagcaggattaagagatgaacagcctaggaactaccaattcagtgtctctggaacaacctggaaatttgattccagttaactcaggttttccattccttatataaatgrtgaaatataaattgacttaatcatatagaaataaaatgctgcatagaattgaaaacacacgtacaagaaagatgcataccttgctatcactgacctatctctgtgcagtgtttatgtgaagactgtgtgcagtttgcacggtgatgtgaaaatcacattccacccctgagaccagccaacagaagtctcctccagttggcagtctcagtcacctgaaattctaaagcagtgtggaactgttcatcatgattggagatttactggtccatttaaaaaaaataaatatctaatatacagcctaagagttcattggttcagacaatttaaaaaatggtgaataaagaacaacaggaaattgtgcagaatcttcccaaagatttgmttctactttggccaaaaaaattaattggcaagataatctattagttccttctgttgataccgacatttcttgagtagtatctgagttatatagtagtagcatcaggtaacttccttgattcttggactgaaaactgatttttattggaatgaaatatcagtatgtttagctaaataacatctgacttaggttgctaaatttcactatgacaatccagctttatggtctactgaatttaatatagcagtttggaatcacttatcataagacatatatgaaaaaaatcaataattatttatcttcaagatgcaatagtattcatctytctaactcaatatactatgaaaacattgcttatggagaatctctttaaaatatatttgcttttatttttagaaaatttaagttcattaaaatatgttagttactgtccatgtcaaaagaacaggtaatttgggattataataaactaaaaacactattagcaagaagtggacatgttagaaaatagaaaatgttttactgatatgaaaaccaaaacataactttaaggcatatttcaaaggagtctgtacctcatatattatattaattactaccaatgttattcttaatgaataattatatctggttgagtataacaaatgattccaactattacataatttttaatgtgtatgccaaatctgttgtaagtgaagaaataagtatatgaagtttgaatagaaaactatttttctctgtctcagcaaagattgaaaaaaatttaaatgtatcgttttgcagggatgcatgtctgacttggggtctttcctcacatcctcagtgcactatttatttgctcatcatcccaccaagatgtctaacttttagggtgcttaatttgtaattttaatagatctactgtttttctaatttttgtggtagtcaactttcttctgaatcttcttatgaatctttgttcatattattttttacagctgatcttcaattctgatcaatgatgattttaaaggtatttaacgtgaagtgattgaatataatgtccgtgggcttttacttctatggtgaagttttatactgttgcacagggactgtcatatgttttgcaaaatcagaattgtttttcagactggattccagggagaaaattacttttctgccaattctgttttataatgcttctctcatttctagggtgtgaagaggatactgacccaccagaaagagaccccactgctagaacgaataagatgtgctgaaagccggagcataacttggccattcccaagatttaacaacaaactaactacccatcattaacagtaaaggtattgaagcatgaaggagtctcttctcagtgggtatgaaacacacagaagtccaaacagaacagacactaagcttcttggacacaccatccaggtttaatagcactctttagtaaggtggaattaaaggtttacatcagaatacactgtgtatttttcttatttcactgtatatttaaaacaagacaacctaaatatagatctcagggcagaaatgttcacttgctataaacacattttgttttaatctccacaaagcccatgttaaaaaaaaaatccttccaggtgtatttgaaaacaggcatctgaagtaggcggctcttatctgatcgctaatgttatgattatgctgctagagtagtgaaaatcagataaacagcaccaagttctgttggaataaagcatacttatatctcagtgagcttcacatggcagytttgtattccttaaataaaaaatatgccatctgaacctatgttaaatttttgtgctatcattatttttaaagtgtccaggctgtttctcatctgttctgtattattaagctgagtttaaactcatgacaacctactgctrtctgtagtggtacatggaagtgtgccagtgtatgatggggtaaaattggcacagccttgtgaggcatcatttttaatcaaaatattagtaacaaaacattttaaaattaaaactattaaaggcttataggtgacttgattttgaaattcatatgaattttataacaaaacaagagacttttaaaaaactgtgtttgtggttgcctgttttggawgtcagcactagacctctcagtatgacatcaccccctgcctttagaagtagytgggaggaatgttttaggagcactgtatgcctaatttcctaatttccttcttttccacacatcacaatgggagaagaataaaaggactagtcttaaacaaaacaacccaccttgttggcaaaacagttttcaatctcaagcttgtcagtgtctgcaacaatttctccattaggtaaaacagtgtaaayaagcagatgagcactaggagcagagtctgattccactcgaaaggagaaggaaaacacccctttcactggagaatttaaaaagaagaacaagttcagaataacacattagcaacagaattatcaatttgattttttaaaaaggcatttccaactatagactttatttacatttggatcacactgaagtaagaaaagactttataccactgtgcaggtagtagtgttcaataaatatatgctgagctaatgacattttcccttaaagatataggtttaattgttcatttcctctgtttaagtaggaaaaagacatttaatgcttgtctctatttctaaattgaaaaatattattgagaaaggagtcaagagagaagaaagagaacttctagacatgtttggttataattcttgtgtgtgtaagggcaatataaacaatgcaacagtcttttccttcaggccatttataatacagcagggatacagatacaaatcacataaaaagccttgtgagcctttgatttttataatagaattctgtgtgttcatctcagtggttgtcctctgtgtgaactacatagagcttatgtaacattccacttgattattttcataaatgttctaagtttgatctttgtagcataaaattattctttaaaaattgtacccttcctgtatctataaaagatttgagggcagctttcatgaaaatacagagaaacagcagagtcaaaataatttgaaacagtaagacgaaagccaaatgaatgtggaattctgaagcagggttaaacataggagttaattttattaggaagctgcaatraaatggttattacactagagtacttaagtttttcactgagtttccgaaatgtcaaagacaaagtcaaaacaatcatttacatagctgtcattaaataaaatgaagtatattttttcttaaagagagggacacttcttcttcccatcccaccaccttaggacccaatccatacaggatttaaactctactgcagaaacaaactttgaagatactgctttgtgaggcagtgactttttcatatgttattagagacaaccttacctgctctaaaaaaatcaatacaatgtccaataacataaaatcagggattaaatggaaatttagagtcratgtttcatatttgaatgaacgtattcaaattttgtgctttatttcaagcagaaagaaaacaatcagtaagagattatatagacctaagagatgttacagaccgaagaagaacctatggtgagtggcgttttagagtgtgggtactgcatccttatcatgaccttagaagcctctttctggctcaaaaagactgggagaaagtctatgaaaaaaaggttttcatctagaagtagagttacaggaaatttattaagaggctaatctggaactcaaaaaattacaaacaaacattaatattttgaaatcaaacttaaattcgtgattaattaaaaaggtatcttaggctgggcgcggtggctcacgcctgtaatcccagcactttgggaggccgaggcgggtggatcaygaggtcaggagatcgagaccatcttggctaacacggtgaaacgctgtctctactaaaaatacaaaaaaaattaatccggcgtgttggcgggcgcctgtagtcccagctactcgggaggctgagacaggagaatggcatgaacccgggaggcagagcttgcagtgagctgagatcacaccactgcactccagcctgggtgacagagtgagactccatctcgaaaaaaaaaaaaaagttttttaatcaaactttacatgattatttaaaggaaaagttgtaaatagttgagttagatgactaattaaaaatcaatttttatttgaaaatttatttgagctctgttaataaaagttccttcagtcaatgatagctcataaatattcaattttgtttcaaaatttgaaacaaacaaacaaaaagaagtctattttttccttatgagattcaacttggggacaagaggtaacaagtaaataggccagctgtacttatcttttgtaaaaaaaatatatttttacttatctttttatgatatgttaaacattcttcctaggataacagaaattaacagatatttatgcaccgggcacggtggctcatgcctgtaatcccagcactttgggaggccgaggcgggcggatcacgaagtcaggagatggagaccatcctggctgacacggtgaaaccccatctctactaacaatacaaaaaattagctgggcgtggtggcgggtgcctgtggtcccagggacttgggaggcagagggaggagaatggcgtggacccgggaggcggagcttgcagtgagccgagatcgcgccactgcactccagcctgggtgacagagcaagactccgtctcaaaatacataaataaataaataaataaataaataaataaataaagatatttatgattcaaagaaataaagaagaaaagtgtgatctaagatagagaaactctattaacccagttgacctcaatgacgttcagagaacactccacttaayagcagcagaatacacattctaacatttatcaagatagaccatattttctgagctataaaatgtctcyataaatttaaaagrattaaagtcatacaatcataatgtcattaaattagaaatcagtaacagaaagatctctaaaatatctcccatttagaaactaaataacacacttctgaataactcatggttcaaagaagaaatcaaaaaagaaagtagaaaatatyttgaactgattcaaaatgaaagtttcacatgtaaatattaaacgatgcaactaaagcattattaacaggaaaatgtgtaacaataaacacttgtattagtaaagaagaaaggtctcaatcaatgaccccaacatcctcatgaagaaagtataaaaagaagactaaattaaaatcaatctttaattgataaagatcagtggataccaatgacataaaaataaaawaaaaaacaagaaaaatcaattaaaccaaaaaccagttgtttgaaatgatcagtacaattgagaaacttctagccaaactgatcaaaagaagacataaattataagtatcttgaatgaaagagcttctatcactatagaaattacagatattttaaaacaatattatggactattttatgtcaataaattagacagtttagaaaaatagacaagattttaaatgacatacacaaccaaaaaattaactaaagtagtagcaaayttaccttgcacttcattaaagaaaataaatttgtatttaaaatcttctcacaaagaaaattctatgtccagatcactggtaaattcaacaaaatatttaagaaaaagaaataccaaatattaatgaattcagatatttagggaggagcttttacagaaaagtgttaaagcttttatagaaaagtgcttccttcttcctgcttataacaaaactggagaggagaaaaataaattgaatgaggaagtagtcatcaaaaatgaactaggacttgataattcggaaatttctcagcttatctaaattgcaaaaatcggtaaaattaagacattcgctgtcaggaaattgtgctctagaaaaaaagctatgatgtgactggacaactttttgctaaagacttgatttgcagaaaaattaaaatgtcagagtaatttagccacaaaaaaagggctcttcgaaaakattaagtgcatgactcttagatacccttacccatcacaacaaaagccaaaattggagatagaattatccatcaaatgtcaatgaaaaggctttttgtttaacggaatgaatctctgtgacacacaggagacctacatggttcttgaaaagtttatactaatagaaacattgtcagcttcaactaaaagggacagagagagtatagaataaaagaagaatatcagacctctcaaatcatgcaagcaggaaacgagatctgataaaacaattcagctgcaaacacatccttcatgaaaaagggcaaatgatttcatgagtggatccttgagcccagacaatagagaaatgaattaaagaggattattcccaggtgttaaaactatgctgttttcctagccagatatcagcacttcttgggactaaagactctttttgccctaggatggattatgtccaggacctcawtaacacctaatttagatgactgagatgatgagatttggaacttttgagctaatgagactgtgagcttttaatcttatgttaatgttatgatggatagagtgaatgcactttgcatgagggatgaatatgaatctctggggccaatgggaagattgtggtaaatagaataatggcccctgaagatactcaatttccaaaacttctgcatatgttactttatatggcaaaagggcctttgcagaaatgattaaattaaggatcttgaggtgtgaagtttattctggattatccaagtgggcccaatgtaatcacaagggtctttctaggaggaagacaggaagatgagagagatttgaagatggtatgtggctgaatttgaagatagagaaaggaaccgcaagcaaagaatgcaagaggtctctagaagctggaaaaggcaaggaaagagtctcccctcaagctccagcaggaatgcagtcctgacaccttgagtttagcctagtgagacttctgacctccagaactagaagatacaagtggtgttttaaggcactaaaaygaagaactagaagtrttgttttaagcccataaatttgtgataatctgttacagtagtaataggcaatgcatacacaagcacacaaagtaaaatttttctgtggttattttccatattttttcagttattttctgccttttgaagacattaaagacataaaatgartatgtattagtttaggaataaaatttaaaatgtaggaatgctataaaagaagaaaaaattttaactgggctaaagcraacccagtatgtcatcctattacatcagcttcttcatctttggatgaagaggttggtgactgtttcttctaatgtgagaatagctccaaaytgctaaattgttcagaatttgacaagatgaaagaggaaagaaaaaggaaatcttgaaaacatttactgtttccttgtycaatggataacacrtggattcctgattgggagatttttcctcttgctttgatctgaaggcagaaggaaatatattcattattgtttaaaagaatacattttaacctaactttaaaacattcatgatatatktgtgaaccataatcttattaccccaacctagaagttattttgatcactaaacttccttttcaatatcttcatatatgtgtctttacatactttaaataaaaaatatataattgtataacgttttattattttatttaatatttatcacttctaataaatatatgtaaatatgtaaacagaatttatgtattttttcaacaaacatttcaaacatctaccttatgcaaagcaatatatagtgaaggcagatataaagtataaataagtattctctaatattgcctctattttaaaaaaactaaatgtattgagcattctctatatgccaggaactgaactaagtaatttactgttaatttacactataattycatgaagtaggtattaatattatctccaggactaaagtgagatgattgacatttctctttccagatgaaattaggtaagttatccaaggtcatgtatctaggaagcaataaatctaggaaattcaaatttattgttaatttttctatttttttatggaattaagaaaatgttatttatagttaatgctcttatacagaattccctatatttaactttttcttcttaaaatgacttatttgagtaactatgagccttggacattttcaatttgggggcattcgtgggaatattggcctcaaaagtatcactccaatttatagtctgcctgttaatataccttttccttgcaatcacaccagtcatgagctttgtaaaataattagaattgaatatttttccagaagattgtttataagttttatttccttttgaatgagttcatggttcttagcttttgcttctttatctactgagttctaagaaaacattttctctttgactaaaaacattttatcctaggctctttcctctcctgctcaataagttgccattggaactctgcaaggaaaaattctaaaagtttcagtggtgaatagagcataaatgagaaattaaagcattaatatttgttaggaagtaacttctcttctagcacaaaaacaatacaaaatatattattgttatcttataaatggcattacttagacaggaacccagcaattttggagtctacacaatcagaaggagctacagtgggtcttattcttaccaaatagtagaaggttaattctttttcatccctgagaatctgtttattcagratgtagtgtgcttgaatctcctgggtttgtccacaggtcaaagtaccaataataggtttgaggtgaatataactcttgcttggggaaaaaaaatgctttgcagtatgagatgtttgcgtatgaaattcatcaagccaccagttatcagaacaattgttactctctttgtatttgacctaatggaagaataaataagctgttttatatataatatatatatrattgcaaaaatatataaaaatatgcatattatatatgtttgtatatatatacataaagcaatataataaagccatataagaaggctgctttcttaaatatagcagaatctgtaaactgmttcccctcgagatcatttaagcttatgctgtactgatttagtagatgttattcattcacaaacaaggtcaattactttctcttaacacgctatggctgcaaattgcataagaacatttgaatattcaacacaaaacaaaatagtagtatgccaaagaaaccaagcaagatcttacttgtattagaatcataaaaatattcaatttttcaaaggaatatcaagatgatctattcaatgtctcttgaacctaaatcatattgtcaacagagtttacctacaagtaaaagatttctggcagacttttctctttttataatttaggtctccatattgcttaatttacattttactcttttattttattttattttattttttgagatggagtcttgctctgtctcccaggctggagtgcagtggcgcgatctcggctcactgcaagctccacctcccgggttcacgccattctcctacctcagcctctggagtagctgggactacaggcgcccgccaccacgcccggctaatttttttgtatttttagtagagacgggtttcaccgcattagccaggatggtctccatctcctgacctcgtgatccacccacctcggcctcccaaagtgcttggattacaggcatgagccactgcgcccggcctacattttactctttatcactttttttttaattcctagagttcacatgcctctcaaatatctttaaattatctctggccacagtaatttctctatttttggtcccagatgcccctttccacttactgaaaytgtgagaaaaggtgatatgtagttggtggtgtccatggaaatgttcaccaaaccatgctcatcagtagttgcactgaaatagtatctagtattcacatgaacatctacagttttgttggtgattggctgatggttttcattgactagaagaacctagagatataaaagtcatagctggttaaattgtcatatggcaataacatcttccactccgtcacatttaccgccaggtcactccctgtcatttactgaagatcttagaatctgaaaacgagacttgttttctgagctctaaactatgatttttctttttaatacttctttttaaaaattattttgaaagctaaatggcagtttattttccattattattctaaattcacaaatcataattatatacatttcctgggtacaatgtgatgttttgatatatgtatacaacgtggaatgattaaatatactaacatatatatcacgtcacttaccactttttcagatgagacatttataatttattattttgaaatgtacaatatattattactgactataattatcctgttatgcaatacatctcaaaatcttgaatagttctatttggatatctcatggggmctcaaattgagaacatccaaaagtgggatcatcacactaccttcccaaactttctccacttccactgttctctctttcagtatatgggtcttccatctatcagrtaactgacgcaggaatactgaggaattgggttttttttaatgagtcattttctttcactgcttatctcaaactcattgtcaagtgctatctcctctccccatctcccatcaaatatatattgattctatctgcttctctccaaatctgctgctaccattctagttaaaatcacattttttcccatctggtttccagtagctatttaatcttctgcatttccttgctgcttcattcttgtctaaaccattctatacakcctgagctaacctgatcatgttactctctttcttaaaaccattagtcacttctcaatccaaaattcttaccatatcttaaaagaccttaataactgttcttgcttgcctgcaattattcagtgaattcggtcatgtctttaaccttagctgtcatcacactggctgctttttagttctttgctcttgaaaaactgtttcatacccagagccttagacattctcccttttatcttacatttctgaccatgtcatactcacctttcaagtcatcagtttttctcatgatcttctctctacctgaaatggccatatgaaactatatctatatagttattaatttcttgataatttaatatgaaatactaggataaatgaagaaaatgtaaaattcaagtataaaatatcaaatataaaattcaaaatacagcttgaagcatttgcccatgaactgttaattcaaagattatttactacaaaatataatttaaaatacctagaaatcttgcatctcttatatgaaagaaaatggatagtttactaaattattggctctaaaatgtatcaatattggtatctatatgaaactttgaaatggaaaacaactttaaaaactaccagtaataaaaaattcaatcatctagatgaaagaatgtgtttgaattcttcctataaaaattatgttacaaaatcattgtttataaagagacaatcaaagagtatgcagctgaactacacaaatgtattacagaggtgtgttaggaagttaataaaacatgctttgtttttctggattttgtgattatatttgctttttaaattataatctgctgtacttttttcctatttgaaatattatttttttaaataaattttgattttgtgatttaaaacttcattttcttaaaaacctcatgccccaaattgtgattatgttaaaaacattttttttacctgtccataccaggggagtccacttctgtaatgtgaatctactttagtaaatctcagtatccttaaggtatctgtgatttcatatgatccatgcccagttaattccaatcctgaaaaataaatgaagttgaaccattctatgtattaaaaactcacctcctacttcctcctcagcctcacttcatcataacaaaataccatccacattctcttttctttattcttgccagtttcccacatttacaagctatttgaccagcaactggacattagcttcaccttcacatgaaacattattggtatccatcrtccctcattcctctggttttccacctatgttctttattttctcaactcctctgtgatcttgctccatctttgtttttccctctctcacatccctgctctccctccacaactttctgtacatggttggattcttcacaatcacactggcccaaaatatgcttgaatttctaatacaaactttatttccagaaagacctgtcgtttccctgcgtgagctatccaaaggatagtgaacacctggtgcttttccattcaatgatgtgtacyctgtatcttgttcttatcaaaaacacagtgctatcaaattcttaaaagattccctacttgccctccatatcgaattctcatctcagacttcattgtacatgaactctcggtagtactccacactaagtaccactgaaactcttccttccaggggcttctaaaaaattatcctcgttgtttttgccccagctctctggcttcttatttaattatgctgatttatttgttactgtctatctcctaaatgcagttgtttctgtccttggacgcctctttgtcctgtctctatcctaaatttagcagtgctaaatgagctcactttcagagcatttgcactcactatttttttttttttttttttgggacggagtctcactctgtcgcccaggctggagtgcagtggcgcgatctccgctcactgcaagctccgcctcccgggttcacgccattctcctgcctcagcctcccgagtagctgggactacaagcgcccgccaacacgcccggctaattttgttgtatttttagtagagacggggtttcaccgtgttttgccaggatggtctcgatctcctgacctcgtgatccgtccgccttggcctcccaaagtgctgggattacaggcgtgagccaccgcgcccggccgcactcactcttaagaggacatagacacaacgagaatggatttagatttacatttctggtcctaatttaactctggctctgttttaaaattatcagctaaatacatccacttccgttttgatattccaagctgtagttatctttaacattggcctggcgcggtggctcacacctgtaatcccagcactttggaaggccaaggcgggcggatcacttgaggtcgggagtttgagaccagcctgaccaacatggagaaaccctgtctctactaaaagtacaaaattagccgggcgtggtggcgcatgcctgtaatcccagctactcaggaggctgaggcaggagaatcacttgaacctgggaggtggaggttgcagtgagccgacatcgagttattacactctagcctgggcaaggagcgaaactccatctcaaaaaaaaaaaattatttttaacacatctcatcataacagttctttttcattgactcattatcttggttaatggtatttccatttcccaggccccaaatttggaatctttggggtcacctttgactaatcgtctgacgtaccacatggtagcacattttttcatctagcctatcctcttcaggtctgctagacttaccttttaagaatatcaatttatttagacgattcttctcaaatatattgaaagatatccaagcttttcagaataaatttaaactctttagtgtatgatttacttttctccacagcttagcaccagcctccattttcagattcttctgagatcatagtttttgatgcttatcacgttttccctttccatcattaatctttcaaagtattacctaccctatataaatcagttgaaatgctattttagcaataaggttttctttgggctctagaaggtatactagaattaattacctctcttcatactcacttggcccttttttgtatttcttgcagaaattttattatggctatgtgcacacacacacttaatttctatttttaggtgcctaattccttgagggcagggaccgtgttattttcataatctccagaaactataaagtgttttacatggaatggaagtttgataaatatgtatcacattaataaatatttaaaaataatacaaaccggttccctcctctttgaccttcgctttgacatgtatcgtcatgtcatactctttttgtctcagctgaaatattttagtgtttacaagttgtgtgaaacatccttcagtgtctgcctgaagagaaagaaagagaattctcaggtcttccaatttgctacttaaaaagtcagctgtcaatttatgagaatttttttactggccataaaaataaatgtaacaaatgttctgaccatycttttggtgcttatcttttcccaagcccaagaatgacataaagtttcttcgttcatcattgatttattcattatcaacctttggcttctcccctctcttctgaaaactgattccatttctgccatattcaactttctagagtttccaaacgtgccatggtatttcataattctatctctatgcatgtgttgttcctcaaatgataattctctttttcccattcttaccgtagccaacagttaggctcctcaaaacttaactcagacataacatattctgagaaggctttcattcctataaatattgactaaggattgctatgttttgttttgttttttttctttttttgagtcagagtctcactctgtcacccaggctagagtgcagtggccatgatcatggctcactgcagcctcaacctcctgggctcaagtgatcctcctacctcagcctcccgagtggttgggacgacaggtatgtgccaccacacctggctgatattttattttttataggggcaggggtctcactatattgcacaggttggtctcaaactcctgggctcaagcgattttctcacctcagcctctcaaagtgctgggattacaggtgtaagccactgcacccagccaggattgttatgttcttaactgtatattctcaatatctaggatattaataggaatatatacatttattaaatagatgaatcctcaccataaccaagttttcaaactaaatgttggggtacatgttttaataaagatttgttttcattttaaatttatttataagaaaatctttattgcataataaatttaatcatattaatttatttttatatagatgtatgtcatgactcacttgaaaacagaagttaatactagtctccctgatacattacagatttgggcagctagattcctcttatagtatcttgcttgtcagtgtctgccttggtgttcattattatattcgttactctggcctctcattcatttgctctctgcagctttgataactttcttttccatacccttgaggtaagaggtgggactcaactttggaagcaggtctcagacaccggrccaaattgagaacttactaaaacagggatgcagggtggctgctttccattagacgtgcctaccagtgtgccatgtcagtttaccattgcygtggcgacacccgaagttaatgcctctttycatggcaatggcctgacaacccagaagttaccactttttcctggaaatttctgcataatctgcctcttaatttccatgtaactaaaatgggtgtaaatatgactgcagtactccctttgagctgctactrtgggcacactgcttatggggtagccctgctctgcaaggaacagtacctctgctgctgctgtacgctgctgcttcaataaacgttgctgtctctaacacctctggcttgcccttgaattctttcctgggtgaagaaaagaaccctcttgggctaaaaccccatttsggagcttacctgccctgcgtcacccttacagggtctgctcatactgccacaccctggactttttacatactctgcctctggaatcagtaatttttgccttttattttttaatacatcacattctactttcagctgttccccttaattattcttattccacttcttccttgacgtgttttgggcatctaatccattgtccttggaagycttccttccttcagccttatacyggtttaacattcctccagcgcagtttactttccacgacattccatttgattctcccactagccaaattcttaacacctgccacacacatttttctgttttctgtttgataaaagacaactctggatccttccacatccttttatgcccttatatctggcatttggattgccgttggaaggacattaccaaactaaccagataaataccactagatacccacgagcccaaccctcaagtgagcccccaacactgccagaccatcttacaattttcccccactccaccattttgcttgatgggtatttcaaacactattctctgttgtattgtattcactattgtaatccatgagaagagaaaaccttggtattagtgtcctgagsagagtggtttccacatamctgttgattgaattcttcacagatactttgtgaatgtgtgttgtggcagtcggaacggcatagtgaatatcttctgcatacactaagtgtcaccagaccagggacaggctctccatatgtgtacctataacaataaggtggccatgcgaaaagctacttaatggaaataatactgatgtttcttcaactgacttgatcctttcatacatccaccttaagctgttgtattaccttccatattatttccattttataaacccttcttctgaaagrccgtgtcttaattgtccataactctcagaaaaagtactggaagaatctttttgaaacagctccaaatggaaaattaccaatttagtttttctcagatctttcttccctcttagttgcggttttactataagatggtcctatttccctctttctctgctgtcagattatctaggtcatgattccagctttgacaacacctcctacattgtcttagggcaacatattaagactatgtagagagtgtatttctgagttctccttgatttataggtactttaagaaaataaatgtgaagttagatggaaaagtagtagctataaaacaaaaatgttgtatcatgactcagtttgaytctgcctaatatgatagaaggaaatgacacaaagccataactaatttgttgtctctcaaaacgtgttttgtggaccaccagcattgaaacgatctgggatacatgttgacatgcagatttctgagactttcctcagatgtatgattggaatctttggacatggggccagagaatctgcatttgaagtaagcacactccccaccccatagattctgttgaacactgacgtttgaaacctattgctttagcccaaatgatggggcagataaggtgtagggtcagttccccaagcttctcctttttataggattacttacagaataaaaatattagtacacacaagccaattagaacattgtctggcccattttaaatgtccagtaaatgattttatgattagcagatgtgtgtcatctgctactgtacctgctccctactgtgagcttaggcaagctacaaagagaggtattcctctcctaattaaaayacttccaacttcagtaactgttatttacaatacctcccctcagatagagtacagaaatagaaatgagatgaaaaaaatgcaactcacaaggcacaggttgttatcacaaattcttcatctagaaaaccaataaccttgggcatttttacttggacctcaaatttaggcaaaactgttttgataaaaaagaaaaaaaaaggtgagagtgggccagagatcttacaagtattrgtagtagatgctatgacagaacctttaacatgtggtcacatgaaatgacttcagctacaacagggagcccagggacaatactgagaaggagaagccattcattaccatgagcagtttgtactatgttcacttggttaacttgataatacattccctagactctctttctctgaatttgtgccagatttcccagatagagggaaggcagcatgattagtccctgaagatcatcacagttagatgtggtaaagagggaccaataggtttcaatgtattcttattctttccctccctaggcccagctyttcttcccaaatgccagccctgctgactaacagaggtctgaggcccatcatctgacacctggctataagcctactaaagtggtagctatgcagagtgcagaggtaataatcttccacagattcttctgtcagctcctctgcatggttggtgcacttgggcagctgagggtccctcgcttcccagacctttgcaagctcacatttatacacccctaatcatgcttcagaactggctagtaattttctctcacctgtcaactcctcctgatggcctcttacttttctagcttctctcacagttttgtaaggtgttattcctacaatataatactattctgtgattttgatggcagttctgacgagttttgggaaccatgttttgtgataggacttctcagccatggcataaaatatttaatttacattacaaaatccacataactgataactaataagatggcttcaatgtctgacttagtaatcaactatggttgagtactgactagatcaattgtgttaaagtttagttgactaccatacttagttgaactatagtttagttgattactaaattatatggtttaggaatcatagttgattagagtagtataggtgtaggttatagacaaccataaaataatccctggaaatactttcagttataaaatataaaaaacatacatagtgtatgtagctgacacaatgtattggwtaacaatttatgtttgagtatcaattcaaatctttcctaccccttaatgactctgtgatttttttaagttactaacttttccagtactgatatgctcatttgcaaaatgggaataataatagtatctgtcccagaggggcattgtgagaattaaatgaggtagtacataaaaagcacttagcaaatatatgggtaaatttaaaagcttgctaattttcaactattgtatgctagacctttgattcttacctatatgtaaaaattatctaatcttaaatactctgacgttataaatgccttacacatagagcattcttaccatattcattcatctcaaatgagtgctgtattttcttccctgactctctctgcagcatgatcttgtgggaacccagaatgggctccactgatagcgggaaagagagttggttgagtcccccttgcaatttgagactttgcctttggaaaatttggttcttcctggggtcctataggtaaaaatattatgagttcatagaaacaattgaaatatatacctttgagtagaagggcagctttgcgggtaagaacgacayaggcagctgtatcacagatggttggtaaattggcccaaaggtattagcaaagttttataggaattccaacctgagataagggcaataagtttactagctatgagatattacagataacatttygtactgatgcctctttttggtattatgtatatttattttggtcagaaatattggatgagtcactaaattgcatcatctcaagaaatgttcctgcatttacatgttatccacttagaatttaaagtggacagaaaaacagtatttgttyagctttggtgaaatggtgagggaagggagagaggcaatttaatgtaacttgtagagagtcctcattccagttgtaatgtacaacataccacttacctcaatataaaccaccggaaactgaaaagaaaaaaagatagtatgagcacatggtagaatatagaaggagaaaaccatgacaccagcactgacagagtatatgggccagagaaagtaagtctctatattccaaatgaggaaataccccatttggttcacagcactttgtatgtttagtttgggacatacatctttcacgaagtcatgactttcctattgttaaataacatacaattgaggaaacctatttagataaaaaggtccgaataataagtttattattatttcacagattatatttgtttaagagggaaatcaaattcacacatttattcaatgaaagtaactggaatctttaagaggacagcttcaactgcatactgaattcattttaagaatgcagtttatggagtgccttgattctgacatcccttattcttctagcagagatacccttatgagatcttcatgtggtgggcttaaaatacctctttaactggtctcaagtttcccaaaagaataggccttcctttttccctcagccatcacccatcattacgagactcaccatttcatccaaagggtggaaattgacatccrtagagacaacacggaatttcactgaaacagaggtattttcctgtgaaatcaccccgtggagcctggggtagtaatagcatgcctgaattcccaggattgcagaataaagtaataaagaagctcctcccctctcccaaagttccccttgctcatttgattcctcatacctgtttgtcctggtttgtatatgggtttgtctgtctggacaaagactaggttctctgctgtagttayatatattgatttgctctttgtgaaatgcagagttgccccctctacctccacagcaatgaccacccaggaagatggtaattctggaatctgtaaaacagaaatgagctgaagaatctgcccagacttacttctgaatttctcagccattaggagtttctgtcttcctggttagtccctgagaattagtaagggacaaagtcaaggataatgctccttgtcttaaaagtagattattatgatgttgtaacatgacagtaacatgattgaaggagaaaatattgcaataaaatgagctaattcttcaagccagttatgactgaaatgggatgcttgcattttcacagcaaaatggtgatattaaaataattattaaattttatttttcaaaggtcaacaacattatatattatctggccaggsacrgtggctcatgcctatagtcccagcacttcgggaggccaaggtgggcagattgcttgagcccaggagttcaagaccagcctgggaaccatagtgagacccccacctctacagaaaatcaaaaaatcatccaggcatggtggtgcctatctatagtcccagttactcaggaggctgaggtgggaggatcacctgagcctgggaggtcaaggctgcagtgagccgtgatggcaccactgcactccagcctgggtgccagaaagagaccctgtctcaaaaaaawttttatgttattatttgtggtaactacatatgattaaacaattaataccttaagtagtaaaagattaaaaggacaatacatccactatcaaccattggtgagatcttagataagttatttgactttataaatctcagtgtttctatctgtaatggtatgaatattatttacctcagaagtttaagatcagattaaatcctttctataactactgttaaattttatgcatggcactctgtttgtaaatatcatgtaagctgtgagcatattcagtagaacttccattcttaaaatctaaattgagattcactctgtacttcttatttttctttcattatgcattttttattttcaaaggattagaaccaaaggtatcagctaatgtgctctttctctatccagctcccttatttcaaggatcagtactgaccatgaaggaactgcagtagaaatagttcctcttcgtcaccaggtctgtgaggagggatctcttctgcattttgtacatcagagttactttcagtgccaccatctcattcaggtgattaaggatgacacaggtcttttcaggaactccagtgtagaggtgtgatgggaccagcactaggtactacctgtggaggggagaagtccagattaactatggaggggtcaaaaagacatcattattatggccattttctaaataatctttgcttttgtcaccaatcatagaacagagacagattttagcaggagtgtattctccaaaggccaacccaaaagatctgaggaactgagaaaaccagaagttaaaccccagatatgcttctcttctgttgtgaagtactcacccacataatattagcaaagctgtcaatagccatgggtaagcaatccatgagttattatatattttggataaaaatttcataatttcaatatgcaaatcaatcaamaaatcatcattgaaagcattaagaacctctctgcatgcggtcttgggttttgcatggatgatactacagatctctttgttccaggaaactaggaaaaatataacatttaatacatggggagaagctgaattgcttttcagtatgaccttgggagcagggccttttctttctttagctcttttcttttcttttcttttcttttcttttcttttctttctttagctctttggtgatggagacgaggcaagctgagccaggctaatcaccagacatattgccatatacacccagaggaaaataccactctcctctcaccaattgcctctcacaagcacccagacacactacatctggggatgctgtacgtgtacacactcttctctctcttcctgagtgtccctgtctacccagaaaacttctgtttgcttcataacacatatctcaaaagtgactttctctgtgcagaatttggtgaagccctctctcttacatcaggcctcatgaagagtggtcattctttggaagtattctgacagaatcctgcaatgcctgcttctgtttttcttctatagttcattctctgtgcaccatctctctacttttccatactgtgaggtgttgagggcggcgtctgaattttgctaatctgtagattcccaagacccaatgccagctcctaaaggtgtgccaaaggattgagtgaactgacacacaaatcctggcttgtctgtagagcatacattcatcttggcaatcccttatttgaggaaaacacagatactgagtcatttcacaattgtcacgacgtgcaatccattttatgaatcaataaaaaaatgtatccctttttgggtaggaattctatattcttttttggtaaatgtttcatagatgttgctgccttatgtctgtgactttcctgaaattggaggatgtctctttccacatgagtagtaatgacttgctgatacttcctggcccttttgacagcagaaaattgtgtagggaattaggaaatacagatcaaagagataatagaacgggaaaaaaggaggacaatttaattttctggaaataatgcttatggttctgcagcagctgcagcatcactgggaaggagcaggaaaagcaggatcaagactggcgggggcagttgatttcccatcacggtacagaaaggaagagggcagaatgggagcctgagccctcgattcttttaaccctgttcttgctccaactcactggtttttatttcatctgatgggcagtgaaagtaaactgccaatcatttatttttgtaacatattaactacttccagcataaaaaaatcaattccagatcattttcatgaccatatgtattaatttatccactttcccaaattttctaaattcctgaaaaatagtagtttgaggctaccactagctcaggtcattaatcagttttaaaactattttcatgaaaacacaaaacaaattacatggtttgatgaaataaaccaatattcttgcagttttaaaaagaggtattaatgtaaatccatatcccaaatatgttttggtagtctagggagcacaacatacattcttcacccaagattcatcctaactggctcttcagtgaaacaaggaagtgaaatctgtcatagaattttaaataagacaagtttgggagcaacctctccattgcttgaaagattcacttttgatctgtataagtattcttatatttactattttaaaaagggcagttcattgggtataacaacatatgtaatatataattactgtttcttaattcattcaacatctagaatataaattcagttaatttattttattctctaagaaartgatctctctctgatgaacattcttatttaattttatcctgagtgatagaaaatattttatcaacagtgatgcatcatcctatttgctttccaaaggggattcagatgttagaatttatttttatggaacactgaaaataagaaaggtcccattgttaaattaataaaactagggccttataaaattgaagtctggatattttgaataaagaactgatttcaactataaaataagatgtgaagagaaataggcacttctgagaacggggaatattttactgtgttcctttctaaattggggctaggcagatcttgacatacacttttctatatgacctgaaagagtgatggagaagtaaagatgatgtatgtgacaacccttggtggactgcaaaactgtagatatgtaagctattaaaattccaatgatgataaactatggctaaaaaaaatgccaagtcaaatggaataaactgtagtaatacattgtgttggcccttgtagtcgacaaatgcttgcttgggtaattgtaaaactcttctgctttattttggctccatttgtatgctctcttacttccactcatcttcccagctcttcccacatcccaccctcacccctagattaccataaacgtgcttattctctatcagtttaatatgggataaattaacctataataagcagtaaatgacttttaagaggtctctatatcactttttccaggcatgatcatactttttagatacgtaccaaacctgtatttgaccaaatgctgaatgactaaacataaaatccttttttgtaygtatgaagcaaaaattgtcatcacagtttgaacttctggaatagaagaataaatctcaagaattatcagaattttatcattttaatttttaattaaaatattttagttgatacatttgaaacatttgacattatagggtaaacacaatactttctcagcactgtcagctaaggcttctatactcttgggatcttcaaacattttccttgtattccttaaaagaattttattaaacatgtaatatcttacatacacttgacatctaaagtgtctacactaaaataagtgtagtataatactgatgtttaaaaaataaaatgtaataccactttttaaatgtatccgatgaaatgtagacactgcagtgattttttttggccaccaccgttcctgtaaaacacacatgaacacttttttcaccagcaggaaattttatatcactcttgtttctttttggtcttatattttcattctacttcctcaggtaattttatcctggagttgcatacttcaatatattttattgatcgccctattatatgtttctgcaactaaagatcatcaaagattattataaaaatattcttgagcctgtaaagttctaattagtaataaatgttttctaggttgcattatcattaaaattattatcaatatactatttataaaattatatatctgctataatcttaatagatattaaaaatgagaacattttgttcaaaaataattttttagtgaaataaatcatgtattccagctggctccctaagattgtgtattcttggatgaatattgcttattgctggattaaaacaagtttcatctattctctatttgttctaccctgctctatttcaattctagaatattgctaytctgttttctattgtatagatgtaagcactaaggaaacctgttcacataaagagagaaatagaaataggggacgttctattataacaatgttatctaattatttaggcttccatgttaaaagccaaaggtcacattataaccattaaaaattacttttaattatctatcagctgataagtcctctgtaattttattgaaagcaaagtgctaaaccaggtcaattgcaacaggatttggaaatcagccattatgatcattcttattctcggttcctagaaagtattcaataaaggcttaaaaggacttataaacggccaccaatcattactttcttacttaaaaacacaacttttaccaaatatactcagaaagtttggaaattttgaaatatcatttattttaatatactttgtcaatataaagcctcataaaaggcttttatctgatcagaaccataacctgcacatttagctcatttcatttaaaggaagtctccaccagtaacctgatttgcaaagccagtccttattgtcaaaataaccagtcaaactggacttatttctaacagaaaaaaatgttgcattatttttaatttcaataaactcactaatatatattcccrggatgactctcccactttgcaattctaagatgaagagttgtgctgaatrtttgttacctagatgaagtaagacaaccctactttkgtatttctttccatgctttctgctttattcttatggaactctcagggggaatacaacattgacaagagttggaaaagggaagaggggaattttaaatgtgaattgtaatcatttctgtcacctctacaatatgtatgagtactgaaaatttcagaacaggccaaaagaatcaatttctaacatcatgtttttcttataccagaaattgttttaagacagatgggtatatgatacctacaatgggcttatgatgccttgattaagagagtttgtgcaaaagagaatttgtgcaaatattaatattttgatttatctttttgtaagagacaagcaaggcgtttttcactccaagatacatctaaaatacatattataactgaaagagaaaatgtatattaaaatcaactcataagttatgccttgattatattacagcawgatgacagtggttttataacattgcttacaacaatcgtaagattattgatcattcayaatttcaaggatcccagaaatgacactgacataaactgagggcaaagctgactgtaactaaaagattttagccaaatgtcaaagtcaaagataaatgtcatagcgccctaacaaatagtatrtgtttatcaaaagcgataaacctggagatgtcatcacaacaacaaaaactttcatgaaaaagacaagacaaaggtaagttacgactgtaattgtagcattaaatatagggactagaagagaagagatatatgtgaaaaaagttgactttgtaattgagaatagttttgatacattaattgtataacagatttttcaaatgatccaaaataaagctacttttcaaaggaactctacaaaagacattattacctttggacatatttctaaaccaactttattttcaaagagaaatgtgtttacgaagcattgagcaactttgggtgggttgagaccgaaagtatccttgccacttgagtatacattgggggaggcagagytggaatcaytggcatatgtggaatgaaattaatgcatgtattagcacataagggatgtgaatagcaatacttttcayaaacaaaaaaagcaggattattggttgtaaaatttatctaccatgttaatatgctgaataatcctgtacgttttctatccttgtgaatacttgggctggcagagaacaggctggaaaaatcaggagattacagactacgtttccatccttcaagtatttccctgcatggatactgagacgtagaacaaatgataaaaagaacatgatgaatgtgctttttgtcttattagaaagactcacacttaatatgacactatattaatattcagagatcaggccagtgggcttgtcaactgagctgtaattccaccagcctgctttagtcaatactgcaatggcgcttccttctatacatattattaraaactgccctagtggaaaataatcttctaccagcccagtcttgctttttatattagaattaaaatttttattcattaaaaacattattaggagagtgaaaggaaaagtcacagaaaagaaaaagatattttctgtatatataattgacaagtgcttatacccagaatatattgaagacttccagaaataaattagaaaaagacctagcaccttacacaaaacatccaaatagctaataaatatatgaaaaggtacttggtctccagagaaatgcaaattaataccacaatgaaatctctacatatcctccaaaatggttaaagttaagattcataatgccaagttttagtgaggatgtggagcaaccgaatctctcatccaattgtgaaaakgaatcatcattatctactagaattcaycatccacagrgcctctgtcccagcaatttttaccgctacataaatacccaggagagtgacagcaaatgtgcaaaaagtcacgtataagaacatttgcrgttgcattatttgtaatagctctaaattgaaaacaactcaaatgtcccacaacaggatatgtaaattgtggcatattcatacaattaaaactttatagtgtttttcaatgaaatagaataatgttaactgcatcagtgtcaatgaatcccatgaatatagaactgagcaaaagattccacatacacacacacaaacacgtatacacaaacacattacaaatcatataattctatttacagaaacactggtgtgttcattctaagtcatccagactagtcttctttcttgctcttagtgaatcaycaatggaagttttgctcaggagaatgaaatgtcccatacttgtacatgcaaacactgggatccccagttaccacaaccccaacctgatgggtctcctaccttcacctcctcagccatactaaactccttgcttttctttggcagttgagaatctttctacttgacttgaagccttcacaccttttattatcttctgttgtattgttcttctgtatatgttctgatagctaacttccttactgccttaaacctttgctcatctatcagcttctcaatgaggtctaccctgatcacagcatttaaaactgcaaagtctaaccccaatcttaygatactcttgatctcccttgctgtgcctttttaaaaataacatttgtcattttatgacatgttayaaaatgaacttacttatatttcttgtttattgcctgtctctcctctctggaatataaggcagagatgtcttgtttttcactgtttcttattattcagaagtatatccactaataacaagcattcaataattatttgttgaataaataaatgaaaagaattatgtgcccatgagaaacaacacttgctttttctttcttaaaagtatataaaaagatgaatggataaattgaattgtatgcatatatttaatatagaatgaagcaataatatttcaaggagaatgacttaagaataacttcagatgatgtgaagtcagtctttgtacaagcaatcacataacagagtcaattatatagttttatcagcagatcacagggccttctttctcttttgttagtgacatagatgaatacacacacacacacacacacacacacacacacatatattctgtataatcattaaaaatgtcacttaatgtaagaaagaatgcggttctcatttacattcttctagtttattattatttcttgagaaaatattgctgggttcattataaaatagattctggctgttgcgtgttagcgcgcgtcccggagtgcgcatgcgcaacggcgggggttgttccggcagcctttcactgaggccacccgccagtttcaaattcagtggcgtttgccctgattcccggggcctggctttcagcgtagcaattctgccggcgaagaaggtgagcgcagtgctgtgtggcagcagaggtccttaggacgaggagcagcgggacgaggaagggcagactggtgaaatcgcaaactgggcgtctgttccggcgccggacccctgtttgcaaaggtgggtggcccgtccggagcggaaaaacattccggaagtggagggcygggccagcgtgattgacaagcgggaacccctgtgtggggacggggcmggcctaggaaggttgtgcctgcggtggaacggsgcggtgcgcaggagtsggcattaacagcagccgcgtgtctgggtcttagatttggcctagctgtgttgagcttttcatggattatgttacgtagataagacactgcaacagtgagtgagcgcttgtaacccacctgtctcttacagaaactgagccccagcgatactaactttagcaaggatacagctgggatcctaaacttggcgatcagagcccagagccgataaagttagctgcgtgagtctagcttcccccrgggcgggaatcgaggcggagcagggtacagtacggaggccagggatgagtgcagttgaccagattgttgacggaagtgtcataaaagtggacttaaatgttgataagcagctggttgggttccacacaggktgcgagctcaggatgcacgttggaggggacacagggycagagcaaggtgggaatgcgggtattatgggccaggccatcctccagctggtggagcaccgcagcactgcagtrtgtggccctggcttaacagcagtgcggaaaagcttttctcttggggctgtggtgctttccaggtgtgtgaagttaaaacattttagggccatacggtaggtagyacctgccacatagttgtcttggtcagccccggctgccrtgacaaaataccataaactgggtggcttagacacagaaatgtgttttctcacagtcccagaggcttgggatgtccaggatcaatgtggggaggacacaactgagcccacaacaatagtctgtactcggtaatgagtgataattggggactgaagaaaatgaacacgttaagaactaatatgttcctgaagtgctttcacaactctaacctcgttttatgagcgtgagctttgctgtcctggtgtgtgccttggcactgggaggtgatggttgtcctccacacagccaacctgaagagggctgaacaagtcgctgcaaatgtttttaatagggcttagtgaatccgttatactcagatttatctaaacctctatgatttagcctgtgctgcttctggaataatgagatccataattaccactgatggggaagtgaaataatacttaacgtttcttctgtattgtttagtgttgtcattctagagtttggtcaccaaatctgtcttttttatcccacttaccctggtgggaggaaaagtgaggagatagaaagtttcaggtggcttgggggtctggcagatgtggttcaaatcctgagttcaagcacttgctgagtgaccttgggcaagtcatataagtttactgagtctcagtttctttctctataaaatagagcttataaaaataccacacagggtttttgtggggttatctgaaaacggtttgaaaccattaaagaactggccatttaactaataggtattcaagtcatgggacctccgttacccagcctcggaagagaaacctttacttacagccccgatgtctggctggctcctcattcattcatcagatttttgttgaatgcctatgaggtgttgaagcacctagttctgagtcctggagccagagaagagcaagacagacaaggttcctctatttatggaatgtatattccagtgaggaagaataaataggttcagatggtgctaagagctatgaataaattaaatacagagtaatgtgatttttwaaaagtgacttagagcaagctagggggtgaggagtgggggtggtgtttgaccactgtccagcggccagacagccggagaggcttctctgaggaggtgagccaaagcctggatattgaggaggactccttctccaggccaaggggagcagcaagtgcaaggcccgagctgagtagatgaggctgggagccagaccagtctcaggctgaccagtgctctgtcttgagaggagctgctggtcagctttttgtcttgggattcagaacgaggagacatgaagactttttacttggcagtgggagctgaagctgaaaggtccaggggctgatgaggccacgtgtaagcgaaagtttgggataagcagaaaccgagtgcgctgagggagtgagattgtggctgtatccggcrcctggctgagcaggagagtgaaccccgtgggtgtgtgtttgctggtgacgttcctggagctgtcttgaagtccgagctgccttgcagctctagtctgcttctgtttttggctttcccagatagtttcaattcttactctcagtttgtgaacctcccttcagtgaacctcccttyacttatgctggatatctcttgcgactggatgagcttcactaaagcacagtcatttggayctggattcgaatccctggttttccactttttagctgtgagtttgagcaattatttaatttctgtaagcatcagtatccagtagctgtatccttatagtgttgtacagattaaatgagataataaaagcaaaagaccactgtagagtgtttaacacataggaggtactcaaaaatttgttaggtacctttcctcccctttccttcatgtgttaaagctttttcagtacatacccctctctcaggattgaattgtaagtcatattttttaattacccttcttgtaataattcctctacctctgtagtcatgtttttcttttttcattttgtcttgtccccagaatgtctaacaaaacagccaaatatacctctgtraagacagagggtaaaataatgctagttctgtgagttctcttcttgtgcaaatccataaactgccaccaatctgtagtcattttaattgcycctaaaccgaagagcatcrtggcaactacctttcccctcgtagagtgacactatcactagtcttaytgaggccaaagttataaagatgggctctcgatctactaatattagtaaaatgggtttgggacttactaacatttgtgcttagaagagacagacctggcaaagagcttggagaagtgagttccaaagagagaggtgtgggaaccaggatggaagagtcaggcctccagatagcgtttacttctcctttcttccttgaatcactgtctcasagataattaggttcagragaggaggaaaaaaaagatgacgtcaacatggagcagagtttttcttagaccttagcctagcaaggaaagagaaatgcctggtctcagtgctgggaagctgttycagccagagccccgtggctgtgaagagagctctcctgtctggagccaaacagaaagctcataggtcttgaggccagaaaagttagtaggtggcggctctggtcggtgctggaaatggaggccaggatgaactaagaagcaaactaaagatacttgtaakataaggacgtgtaggctgggtgcggtggctcacgcctgtaatcccagcacttcgggaggccaaggcgggcggatcacgaggtcaggagatcgagaccatcctggctaacacggtgaaaccccgtctctaccaaaaaaaaaaaaaaaaaaaaattagccggccgtggtggcgggcgcctgtagtcccagctactygggaggctgaggcaggagaatggtgtgaacccgggaggcgagcttgcagtgagccgagatcgcgccactgcactccagcctgggtgacagagtgagactctgtctgggaaaaaaaaaaaaaaaaagataaggacgtgtatgttaacttgcgctatccaaacaagctgtgcttatggtcctctgcctgtgcgtcatgattttccaggacttcacaacgggataaagtgaagtagcttcggcttgtgaatgtgcattgcagagacgtgggagaagaaagctgcaaaagtcattatragcaacacccttgatcttaggggtgctggtctktgagaagagagctctaagccttttgtagaggyattagaaaggtatcggmgccacggtgaaatgcaggggagattgggtttaggggctttcctggtctgcattctgctacagccgttaaatgccgctagatggagtgcgtgattctggtatggcctcaygtggacctgcgaaggatggagagaacatggtctctgcttcccagaawaaaaggagaaatttggtaayaagtgtggagactgctcttaaataatgctccagatttcaagccacttcttcctggaccatgagagagctccctaatgttgtatttatttttcctaggtccatggctaatgaaacacagaaggttggtgccatccattttccttttcccttcacaccctattccatccaggaagacttcatggcagagctgtaccgggttttggaggctggcaagattgggatatttgagagtccaactggcactgtgagtatgaacagtgagagatactgaaaaggacaacttwacggcagctgtgctagcttttcctgtttgcccatccagagattttcatagtatgaagttgggcagaatagttgctctcagtttatctttctgagtaatagtcacttcctctattaaagtcttttttttttttttttttttttgagacggagtctcgctgtgtcgcccaggccggagtgcagtgggacgatctcggctcactgcaagctccgcctcccgggttcacgtcattctcctgcctcagcctcctgagttgctgggactacaggtgcccgccgccacgcccggctaattttttgtagttttaatagagacagggtttcaccgtgttagccaggatgatctcagtctcctgacctcgtgatccgcccatttcggcctcccaaagtgctaggattacaggcatgagccaccgtgccggcctaaagtcttaaacatagctctgtggtctgagaaaaattaggctgaagtcattggtgcctacctattacggtagatgagatggctttcttaccaactcttttccctccggttccccatccttcaaatataattctaagttttagtctctgctgagtgaaccagtgcgttatgattatgttttgaacataattttgtcttgaacaatatgtcttaatattctgttttytctagttaataattgcccttttaaagttagtttagtttttaatatacctatgccagttcctcccacatcatccagtggcctctcaatatgattttccgtacagataactcctgtcttagtcggccaggactgccatagtaaaataccatagactgggtgacttaacaggaatttattttctcaccattctggaggctggaaagttgaagatccagattctggcagggttctggttctggggagggggtctcttcctggcttgcagatggctgcgttcttactgtggagcaagaaaagasgaggaggagaaaaacaaatctttggtgtctctttctcttttatgaggacaagggctgctcccttatggctgctcckttatgacctcctttacccttgaaggccagatctgtagtacagtcacatggcagggttaggatttcaacatatgtttgtttgttaagatgggcagtctcactrtgtggcccaggctggtctcaaactcaagcgatcytcccctctcagcctcccaagtacctggtggctggcaagatccaagattactggtgcacaccaccatacacagcttcttttgtttkgtttttgttctttaaaaacttttttttaacatgcattttggtggggatacaattcagtccacagcagtgaccaattccatttttaccttggagccctcctggaatcctccatcctttccgtgtcatttgaattagttgctcctcagactgacttgacagatttcagcatgagtgttartggggacagacggccgcacccacaccacgtcagggtataygtccgtttggaggctttcctcaaacgtctggcagccctggactgcctgtgtatgctgaagaasagggcacagaaaggctgagtctgcagggcaggctggctgtggctgccaggctgggctcctttgttgggggcctccagttgccagcacatctgtgggattttccctagagtcttcggtctctccagagcaggtgcctctgagctctggcccagcaggtacagacgctgaagcccaatagccggtcttccgggaggtggtctggggaaggggatccaggtggagagtccccctcagtgcctgctttcagcctgaccctcctctccctccctcttgcctcctcaatctgccagttgcctccagggytctcctagctcagcttccacttagagcccacttcctgtsttctgcaaggagcaggagcagggattgcaacctgggaatctaattgttcttaaacagaatttcaacccgtccctttgttttcagtggcctgctgtgttcctaccacttcctgagtctttctgagaatgagtgggggagatctctggggacacttgggcttgagtgtctctgcsgaatcacttccatgtctctgccttctttccctctctcctaaaacatattactccttccactttctttgtttttgtgggtgtaagcctccatattactttggttaattttagtgtgctttggaacacagatgagtgcatgttcattctgccttgtttaattttagagacagggtgtcgctctgttgcccagggccgagtgcagtgttaagatcatrgttcactgcagcctcgaccttctggcatcaagtgatcttcccacgtcagcctcctgagcagctgggactacaggtgtgcgccatcacacctarctaattttttaatttgtagaaatgagatctcactatgctgctcaggcyggtggtcttaracccctaggctcaagcaatcctccctccttggcctcccatagtgctgagatgacaggcgtgagccactgtacctgaccccttttaccttgtttagcctgacaacccatcttctscctctcaggtctttccatctcagtcttctgcactccaggcttctgcatcttcctcctatgctcagcctttaattgtcgatgtttctggttctatagcttcatcttcttgtgtgcactctctgtgaatgtaccctgtggctttattacctttgacattcttctgtcttctaaatcatctcctgaatagagtgttttctcctgtcctgggtgtcccccagcccataggagcagccatgctgtgggacaccctgagtggggtctgtgttacctgttgtgcctaccatgcccttccccgccttggatgcacaggtgccccaccttagctgcccgagatgctgtttatccttgatagtcaccttttaagccttmtacaggtctatcaagttgagtcaccattaccacttggtgtgtgctgtgccttgtgtaayactgcagttccgggagtcntccaacctggaatgcatgctttgcggggatctatgatgccctcgaattgtatgttacatgtgaacytgtgagcattttctaggggctctgcacctttgtgtyctcagctctgagccccatgcttgctgcaaccagcaggtgttcagagtgaatgaatttgcttatcttggcataaatcatgtaactgttgatgataccccaggaaggtgagcctttggttataaatccttttaacattttccagtctaaaagttttgtggtcttattacasgatgtagaaaacagkgggcctcagttattcttttgctgttgtgccggartataccacggttgtttttgaaagataactttgaccatacccttaggaacttcctcagctcactttcaaatggagggcactggctttctaaccattgtgtctcccagcccagtgacagctgaagctgwctgcttccgatrtcacagrcagcacagaagagccgccctccaggtgctgctgggaaatgctgcctggaacyctttgccatttactttctatcaaaagctgagggaaatggtacatatggggctttcctaaaaatatgggatccatccatttgtcagcaatgtcattctatcctatcccagggcctttcaagattttggtgaaaactaatagatcccatattccagaataatgctattaataattttattattattacttaatgatagcaaaaagttagctaactccaaccgctcacttgttatttgccaggtaatcctctaatccagaggatttggccttttgtgtgtgttaatgtcctgcttgcaccagctctatgaggaaggtgctrctgttgtcatttccatttctgcactcgtggaaacaagcgtagtgaggccagcctgagccacagagctgcaggtaggggaggcagctggaaccctggcrcctggctgtggagtttgagrctctgactcctgcgccgcgctgctgccccaaccstagtcatacgaggtgtttcaccccgccctggatactctgagatcccctctgggttcagcaggctcagagagctgactgcctggagcagaaggcatggggtcctccagagactcccctgagctgagttcccctgtggacaccagggccgcctccttgtggcgctccctgaagggtcctctctggaagaactgtattggttccctggggctgctagaggaaagcttcacaaactggggcttaaacaacagaaactgacatcccacagcgctggaggctggagtccgagatcaaggtgtcagcatgcttggtcccttctgagggtcgygagggaaagatctcttcaggcccctttccttggcttataggggcgtgttctccttgggtatcatsacatcgcctgccttctgtgcatgtytgcatccacgtgtcccctttccaataaggatattagccctttaggctgggtcccgtcctagtagtctcatcttaactaattacatttgygacagtcctatttccagatmaggccacattctgagatgctgggggttaggatttcaacacaggaatttggaggaatacaaytcaatcaggcttatggacaattctggtcttaagtcaagagtagtsttctccagtctgtatgtggaggcgcacacctatggtcccagccacttgggaggctgaggccagagaattgtgtgagcccaggaggagttccataccagcctgggcaacatagcaagacctcctctcaaaaacagacaaaaaaagtggtgttccagagtgattagtttgctttaaaaaaaaaaaaacaaaaaaacaaaaaaaaaaaaacacaaaccgtaaacactggcactcgtgactgatcatcctgtatccacgcacgagctgcacgaaggccgcgcggtcactgtggctcccygttggcgagtacctgggatttcttgctcagcaktttggggccttaattcttttaggggactttttgtctaatgtctccccttcttctaattatgtgcgatatttacatagaatctgataaactgcttcaaatttgttttcagaacagtgagctggataattaaagaagctttttcctgcttcttgggcccagtttccatttcttycttttttctgtttttcctggctattctagtgctartttccttcctttcctttcctaggctggycttagagcatcctctcctatgtacagccagaccttctttcaagcttttattaaaatggggaaaggtcatttgggaggctttgttgttttcctgtttctaaagatcatttttcttcctgcaggggaagtccttaagtcttatttgtggggccctctcctggctccgtgactttgaacagaagaagcgtgaagaagaggcacgactccttgaaactggaactggccccttacatgatgagaaagatgaatccctgtgtctgtcttcctcctgcgaaggggctgcaggcaccccgaggcctgctggagaaccggcctgggttactcagtttgtgcagaagaaagaagagagggacctggtgaaccgactraaggtgagacctggggtatccggaagtgggagtrctggaggaaacagggcttcagcgattgttstggggcgattccgagactcaggcagtgcatgctcccctgccgttgctgtgcctctcagctcttccctcagctccttgggtcgatggtgctgccgctgtgctgtctcttttgagctggaggtcagcagggccttctccacacaaggaactgttggtgcccatttattactcacctgggaaaggacctgatcgttgccattggcagcatrgttcartggctgcaaatggatctgatggagagcgtgtggctttgggaggagygtgccgccttccacagtgagcagcgaggctgggacctgcagggatgaggtcccgggaggggatgcggcagcccttgagtgctggtbggrgaaggagagctgcccscagtgaggaggcgccgrgctgagtggcccagactccttaggagasgcctggttttgggcttcctggtgattttccttcatgtctgcctcctgtaggyggagcaggccaggaggaagcagcgagaagaacgcctgcagcagctgcagcacagggtgcagctcaagtatgcagccaagcgcctggtgagcctcatttcttggggggcaggattatgtccaggcagggtcgcyctgcttggaggctcatgggtgcgtggccagggycttggtctcccctccatgaccctcactggctatgtgctcccgtacagaagctgggctgtgagtggttgaggcgtggatcctaggagtcgacctctctccagccaggcagccaggcctatgtgaatgggcgtggtgtgctttgtctctggcaygtggggaggtgggtactggtgctgagacttcttcctccctccccacctccactgcccctgtccagaggcaggaagaagaagaaasagagaatctcctccgcctcagcagggagatgctagagacaggcccggaggctgagcggctggagcagctggagtctggggaggaggagctggtcctcgccgaatacgagagtgatgaggagaaaaaggtggcgagcgggtgagacagaggcggtagcactaccctgccccaggccaggggacacccttgaagacagctctttccctcatgccacagatgccatgaagcacctggcaagaggcatggtggcctctgccctctgctctaagccgggtccctcctagggtccatgagtgccagtggcagtgaggacagtcaccggcctggcctgtgtcctctcagctgtcctcacagcagctcaggcagggcaggaacatttgygtctgcaccttatacacaaggaggctgcagccccacaaggagagactccttggctgaggccacaagcctcggcagtggagagctgggctagaactcagcyggcctggctctasatctcaggctctgaggcagctgactgcactgggtaacctttgaggtgccaaccgtcaaggcgtccttagcctgagctttccttctcccataaagcctctgttggtccagactcaaggtttccacttgatgagccatgagctgctgggtgacttagccctgagcaggccacccaggccatttcgggcccacaggatccctggtgacagccccgttcccattcacactggaacctcaccaccatccctgagtgtctgctctgagtatggcactgtccagatgctgtggacrtagaagggaagaagacatggaggggacagttaatagacatgaaaacaaatagcacctatgtgaagtcagcatgtttgcctacaaggaaaacaaaatggtgatgtggatggggtggggggctgcacctgatgatgagtcccgtgtgtcctgtgacatcctggccaccacatctgtgggagggtaactgcaagaccagagaccctccgtggatattcctgaaggttcatccccggccttcacggtctgtctgcagggcgccttctgacgccacctccagccgccatccaccagacgccagcttccccgctgccctgaacttcctccagcgcaccaggccttcctctgtcctgtctgaggatttgctcatgcaacgtgctgtggccaaacaccctgccctcctcccttcgcagatgtcttcctctcctttaaggcctggctcaggtgtcgtcttggtggcttcgggtgtcagctgctctgttttgctcacgcacctgcttgtgcttctgttgttgcctcctctccctggctgggctcgagctgcttcagggcaggaaccacgtctttacagtttgatgttcccagagctgacccagtgtttggcatagrggtgtgctcaatamaatcgagttgacatgaatgagcagatgctgcctcgttgcagtctggtagtgtaattccaggctgcscatgtggacytcgacttctgsccctgcccagggcagagaccaccrtgytgctttatgcctcgctggtgagagggggtcataaacagtttgtgctccatgaaccsttcctgcccacctccraggtcrtgtttctgctccctctcttctcccttagagcccatggggacaaggcagagaacttgagtggagatgaaggtggtgaatattagaggaacaaagtgctccttcaggtctgggcaagagccgtggatcctgtaggtcagcttccggggcttcccatgccctcacgtttcaggagataacgtgagcctcrgaggacctgagttctgaatagaaaatttttgckcttcatttcttcacacacccagcctctcagtgagctcctgctggctttgtccagcatgcgacataagattgaatccaagccttttaagatagagccgcctgctctttagtgaccatgaagccaagcctgtaataattactcttctgatagcccaagacaattgtattctgctttgttagaaaggaatttcgaggtgaacaaaaatgttttctttttatgtgatgttgccataggtggcgtgtgcctgtcagatggttttgtgttttctgaggagcatagactagtagagctagctcagcttcaggccatgggatgcagggctggcttccctgccaacgcctggcgctgatggattcttcccgcattgctggraagggcagactgaggcgctgacamaagaagagttgyagctggtcataagtgacagcatcctctgttcactcgattggtcagttgtagcttcatccaggagatggtcatggggttcctgctgcataccaagctctaggtgaggccayggggactcagcagaaacaaggccgacctgggtcctcccttgtggacatgacagtctggggagatagaccgagaggaagcrattttgaatgagatgggtgtgaaggggccatgaatctgtgtcagagcagccagrcctaccagggaaggtcaaagaaggcttcctggaggaggtgatgtttctgctgctatctcagagttgactgggagctggtgaggggagacaacattccaggcacagaacatccgaaggccygagatgatgaagagcaaatatccsccctggggcctcagaggggtccagcttgctggagggagggcagagaggagagcagcctgccatgagtcccgaggcttccractcaagacttgggtttggggtgctgagctcatgtctcctttttacatttccctacccacagacctgagcggccaygggaggttggggttggcatttgcctgggggagtttctgagcragcagcacctgctaccttggtggaacccattgctgggaatggccagggctcagcaccagcgctcagcagatgctcagtgcgttttgctgagtttgctgagggaagactgttttctrttctctctcacacacacagagtggatgaggatgaggatgacctggaggaagaacacataactaaggtaacacgagtgtcctcagctggtgctgtgctgggggctrtgggctgggctgtgyacccttggggaagaggctggagtcactcggctacttctcaccctcctctccacaaaggaggagcttccagcacttggactctgttgcttcttgcacgcaaccctggtcctgagttgctcccttggccagctgcagtggaccctggagtcctctcctggggtcagggcctggggagtcctctcctggggagacctttcctgggagcagggccatgcttgccaccccagggcatagaggaacagctgttctgggctgaagtctgggtgttttctgtccctgctgggtggtgctggatatgactcgtggaaggagctgcctgtggggcattcccttgaacttctggagctgtgggtgacttgggaatccctgggtccctcgatagatgcctgacatgggacattgctgtcctgcctcggctttgtgcattgggagccactccctttccctcagcctctcaggccctggcgtgccttgatgttagagaatgctgtgggatgttttggttccctctttgaagtgcctttctttctctctgctagatttattactgtagtcggacacactcccagctggcccagtttgtgcatgaggtgaagaagagcccctttggcaaggatgttcggctggtctccctcggctcccrgcaggtaaacagtagccagtatttccaccaggggccatcctgctcctttcsccacaactttgtcctgctcgtccaggcctgggagacgctgggtctgtgacaggctgaaccrtgtgaggagcagccccctccctgrcctggccggcccakcactggaaggcaaaggagaggtggcgggggcaggtccacgtgtgttggtaggatgtcatttagctggcaccatctctttgccyctttctttctcctttgytgcagaacctttgtgtaaatgaagacrtgagaagcctaggttctgtgcagcttatcaacraccgctgcgtggacatgcagagaagcaggcacggtagccaccrggaccrtggtgtagccgcaggtggtctggagagagtgaggcaggggtggcagtgactgaagaccattmagtgtctttcatagaaagaatggcagaggagaccccagttcctycctgagtcccctctccttgggaaaaagtgttcctactctctgggtgagcgtctggtccgaatcgttggcttggagatgattttacgggctctttctggagaacaraagtaaaacsttacagtgttccgatgagacacagtaggcagtacttgggagggtcttatagacccyaccctryggaagtgggtctcaacattacacaaccccctctygggcccgtggacagttgctgtcytctctgttttctctctttgtgcctgtgccmccctcagagaagaagaaaggagctgaggaggagaagccaaagaggaggmggcaggaraagcaggcagcctgccccttctacaaccacgagcagatgggccttctccgggatgaggccctggcagaggtgaaggacatggagcagctgctggcccttgggaaggaggccmgggcctgtccctattacrggagccgccttgccatccctgcagccmaggtgagggccctgcagggccagaaagccgctcttggctctcactgtrgtctaggccatgaggggsgtcctcatcacactgtagtttgggggatgccccccaccrtggtcaggttgatggcaccttaacccattctctcctgaggcgtgagttggaggaggcgcgtgggatcccttggggtctccaggcagcagggccagttggcattactggggatggtatttaggagccaggaaagccggtgcattcctagtgaaaccacagggagaggggggatgccaggagctgagaagagtgtgctgcatacatctatttacaaatggctttccaagtgatgctcccaacttccatgcctatgatgtgatggaggatgtcagtgatagaaccattcagttttccagtttttcctttttgtaatatcagtactcttaactggaaagctttccctaacttacacctacctgcagcacgtgagaatactgtcttctctgccwcaacttctcttgatttttaaacagaaggaagaactgctaatgtagcagatgaaaagtagtatctcactgttacttggtgggtgcagtttcactatttccttgctacttctttaacttgagtgactttggaaatgggatatcactagtggaaaattctgtataatccagaaaaaaatgtaaggttttaaaagattcagggaactaagtaaccgtttgcacagcagctaaatgctcaccagcatacctgctgagctgtgtgggcgctggcagagaaactgaggaaagctgccaggccccatggtgtcccaggccttccctccggtctgtttgcctttagagcaaaattagtgctataggcatttatacacaaataccataatatggcccaaaatctttacgatttttgaatttgtaaagtactttgaccatattttgcttttatgttaatagtattccagtgaaattccgtgcatggggacgctggagcccagaaaagttaagtgactcatattttctcaccaagcgtgggtgatggagccattcagttttccgayattttatttyttatatgagtattcctttaactggaaactttcctaacaacaaacacctaaagacctgcagagttgcttttatttttgttaccccagctccacgccttaaccctcactttgaaataggatgtrtcaaccctattttgcagatgaggaaagcaagggtcagagaggttagacaactcttccagagtcacacagctgggragtagcagctccaggagcagaagctggggccgcttcctggtgcaccgatggtcttcargtgttttgtggaaactcgggggcctccggggygaccttgaggacatggacaaggctaagcaggggttcccttcacccagccctgcccttggtttactcaggagtcagaccagccctagtttcctgtgtttcatgtattggcttttcatgtgaaactcgaggagagcttgtccgttgctacaagctgttttttgaaygtctctacacagtccaggcaggaartagaagcactcacatcaggagctcagtgtcaggcaggcaagcctcctgcaggggagcccygccctgctcaggtggcctcatctcccctcccagctggtggtgctgycctatcaratgctgctgcatgcgrccactcggcaggcygcvggcatccggctgcaggaccaggtggtgatcatcgacgaggcgcacaacctgatcgacaccaycacgrgcatgcacagmgtggaggtcagcggctcccaggtgcgtgggcctcccctccccrggccagggcctgccgtgaggtaaagggacttggatggttcctccagacaccygggccaagaattcctccggaggtggggcttgctacagggtgcacgagtcaaggyggtgacctcatcggaggctgaccatggctttccagtgcatcccagaactctggggaccccgctatgacagagtgcctcatttccctgcacctcacctgcccccatgctmctgagtccctccagccctggatgccagcagccagttctgcaagccagggagatggcatgtgtgaggcaraagtcccctcaggattggattttgtcattactgaagttgtctggaggggactgaattgaggaatgctcaagatcagygcaggctcctcctgctgccctatcatgcgccatgcatggcaccaggtgtctctggtcttcacgctgactctgccatgggkgtggtgttcctgttttacattggaaacktggagattcaragatggtcaagctctgtcctgaggtcatgcagctcatgagtgtggagctggggtgtgcccactggtttctgactgtgaaacccccacgacatcccaccrgctctactgacctgtgcctgggctgaattgaggctgggatgtgatggtgrccttgaaccatcactctttgtagactctaggtcttttcccaacccggtggaaactagcaggsagattccatacttgaggaattcagcctyttgctttttctctgacccacagtggacactggaggaaaccttcccttccttcccttttctcttagctcccacyagcctaagggctgtggaaaccmgtaccttttgtctgcacccagccccctctcctccctttggtggcttcctgtgtgtccagggcyagcrtcttctaggtgaatctaagatgtcagtaccttagccctcrgctgcttgctcagagcctggtttgtgttctttccccagctctgccaggcccattcccagctgctgcagtacatggagcgatacgggtgagatgtgactctctgaggtagtgggacagtcccttggtggccccctgcatgggcctctgagaggcagcactttggttcccacctctggcccgkgctgtggcggggtggagctgcatgccattcatgtcctaggcacatcatggtgtgtgctgcacacagacctggaaggctggggactgaccgctggctctgaggcctggggcygtggccagcctgctctctgggaaaggatttgtagcttgtgacccagtttgagaggcaccgggcagcaaggcttccactggggtgggcggggcgagtcgccatcaggrcaccaccacttaatgtccgttggcttcttctcaggaagcgtttgaaggccragaacctgatgtacctgaagcagatcctgtatttgctggagaaattcgtggctgtgctagggggtgagagcctcgccccccggctaacccccggcctgcaaaacccgccgggctgctttttccttggatgcccatcaggacgcctcagttctctgtgtttttaagaagggtcggccaggtgtggtggctcacgcctgtaatcccagcccttgggaggccgaggcaggtggttcacctgaggtcaggagttttgagaccagcctggtcaacatgatgaaatcccatctctactaaaaatacaaaaaaattagctgggagtgttgccgtggcctgtagtcccagctgctccagaagctgagacaagagaattgcttgctcaaacccgggaggcggaggttgcagtgagccgagattgtgccactgcagtccagtctgggcgacagagtgagagtcagtctcaaaaaaaaaaaaagaaccaaaaaaaaagaagggtcttggtcattgatttagaaaattcttgttctttgtagcttagttgagttgtctgacttgagctttttttagacccatgggttctttgcccatgttctgaggactttttatttcaggcgctgctctggggggatattaaggatacagcatcacatrgacacacggtgtttccgtgatgggcatagttctgtgggttgttcgaagcacttgcatatgcggttttgtgtgccctgtgagaacgcagtgctggtatttgaatccttgttgatagacgcataaactagagctcggagcaagggctgctcccagcacgggagcctgggatcttctgactccagctcccacgcctctttgcrtgaccctgtcacgtccccttcttttatgatggggcacccccttgctggaaggtgtctgtggaagtggaagctgcagaaagcctgtgggagctcctggcgggagctggtctcgtgttgctgctctgagccrccagctctgctttgcctcaggctcaccagtggcctgggtagctcctctgtgctccggtgccctgcataccttggtctggctgctgtgtcccggcctcctggagaaggggtgaaaaacatgaacttacagggctttgggttccacgtgcaagcacgtgagtcagacrtgggaggctcctggacccacctgccctctaagtgggtccgttgcatrctataaacagtgaaaagcaaaacaaagccgttcaaatacagatgctcttcttacttgatgtgcagtgtggagggagagaagatagggaagggttgggggkcctgagaaccaccattgtgacctatttccattctcttttttagggaacattaagcaaaatcccaatacacagagtctgtcacagacaggtaagagagttgccctcagagsgcccagagctgatctgagccacttccgagcttaaccctgggactgaaacctgaggcttagggtgaagctcccaaggcccttcatgtgtttgctctcagggacggagctgaagacyatcaacgactttctcttccagagccagatcgacaacatcaacctgttcaaggtagaggtttccaccttgccatgttccacatccaatttccttyctgtcaccacctgtgggtagagtactatgttaagactatagaaggaagaaaaagcaaaacagacgtgtaattacttaacccttaacgcaacacgcctgtgagacaaaagtcatcatcttttagagtgaaggccacagggatgagggatgggtgagaaagggacctttcttggtgccccatagaacakatagagactccaggtccttgctgtctcaccccatcttctggcacagtctccctcaggcttatggacaggaataggatgttgatttgttctgtgcaacccctgtcacgtcttcgcacttgggccttgggtgtggttgcagcctcagacctctgctcgctccaggtctgtgtacccagcgctccccagatgaaacacggccactgccgcctgaaccccaagctcgtaactcaaatcagcaacagtgactgcccctgggtacagggttctgcctctgttctaggcgccatgccacgtgctgtgctctgagctaggatatccttttgccccggcaaggaaagcaaacaggcccatggaggtgacttcaggagggtggcgagcacaggcttcccacaagtgagccaatagcaagtggcagagacagcgtccaaacctggctgcactgacttggggccccacattcttcccatcgtgcctgccttttttttcttaaaaccagcttttcccctgaattacacatttgggtcactgtcactgccaccatccctgccagacaggctggatccacgtcatccttgatgcctttctccccttgtctcccacatgcctgtgacagccgccaggcctgacagcctcagacagtcctgccgtccccgcgcttctcccacagctgggacatgggtgcaggcactccttctctcgccttccctttgccctccttgctttccttctcccctcttcttcccatgggtctcgggtctcatcacccaccattgagggaatcctcatcgaaggacgtcgctctttttagaaaccggtttaaagcctccaaactcctcatctctgcatcccaagctaagatgtggcaccaaaccacacacattggatgcaccgactgagtggcactgccccagcccctgagcaggtcccagccatcatctcctctgtggctttgctcatagaagttcctttgttttaactctctgtcacctggaaggaaagccaaggggacctagattttactgggcactcttagacttgggagagacatttggaaagagggtctcccccctgaggaggacactgcgttgtgggcaggggcagtagaggcgggggtggcctcggagaggrgatgacaaggttggtggcaaggaggctccaggtgcctcagaaggtagcactgcgttgtgctgcctgggtggtagaagtggtgttttttgttttgtgtttaagattacagcttgctcagtttgcacwcatgcctacagctgggcttggtttttgcaggtgcagcgatactgtgagaagagcatgatcagcagaaaggtaactgctcccatcttgtggtcctgaacaagacccagctgtgccccaaccccctgccgttgccatgctttcctcccctgccctcaggraactccagagtccccttcrtctccaccctccttggtgcagtgggccttgctggggtggtgggatgtgcgcttcaggtgtcttgagcctggcagagcctccgatccacccagcctctctctcatggctgttcctcgttccyctccactgctctctctcatcccacccagctctttggcttcactgaacggtacggagcagtgttctcatcccgggagcagcccaaactggctgggtttcagcaattcctgcagagcctgcagcccaggacgactgaaggtgaggcaggagggtgagcaggcagagccggctgcacgcatgggcaaggacttctgttcctcatgtgtggacctgacmagagggaggcctcctccccrttctgctctgtgcagcwcttgcagcccctgcagacgagagtcaggccagcgtcccgcaaccagcttccccrctratkcacatcsaaggcttcctggcagctctcactacggccaaccaggacggcagggtcatcctgagccgccaaggtaatcaggtggttcttggccaggttcagttcccaggaaggagccaagctgagcccgggagccgcagcatgaaaggattctttccttccatcctgggaactycctgggttaggaggaagcagtgcagtgggcactggcctgctgtgacctgggcaagcagtggaggtggacgggaggagatcgaggggctgggatggaggtcctctagggcaggggtcctagggaaacttgtattgtggggtaggtgggctttggtttgggtcatgattttgtcatctatgagccttgtgatttggactattttctttctcaacttcagtttcctcatatgaaaatggagaggataggccgggcgcggtggctcacgcctgtaatcccagcactttgggaggctgaggggggcggatcgtgaggtcaggagatcgagaaccatcctggctaacacagtgaaaccccgtctctactaaaaatacaaaaaattagcagggtgtggtggtgggtgcctgtagtcccagctactcgggaggctgaggcaggaaaattgcttgaacccaggaggcggaggttgcagggagccgagattgagccactgcactccagcctgggcaacagatcgagactccatctcaaaaaaaaaaaaaaaragagatggagaggacagtatggtccacctctgtgggctggttgtcctagagattaaatggtgtttaatttaaagagaaagcactagcacttgtgcctcagacctggactcacctgggggaccccctttgctgggacgayagaagtgtctgttgggcttgcactcacctcccaccgatctgtttttccaggcagcctcagtsagagcaccctgaagtttttgctcctgaatccagctgtgcactttscccaagtggtgaaggaatgccgggcagtggtcattgcsgggggkaccatgcagccggtaaggacacctttcccagcccctcgtgccccaggtgttgggatgagatggggrcttgggagagatgcrttatcagtcctgttctctcctggggccscaagccagaaagggtcagctcgagcaggcccagtggtgtccrctgggtgacactgctattctctcactgctgtgccttttaggctgcaggagcagtgcagactcctctgctgctccattctgtagccccaggatcacacttctcccagagaaagctgttctgtggtttcaaactcaaggaaaaaaatcatgattccacttttaaaaggttcattttgatgtatatgaatataatagtctttgtaggcataatttttacttatgtgcatagctattttaaaaacaaaagtgcggctccctccatgtgctgtcactggaacttgctcttttcactcagcagccagagggtcataaaccctgtctccttgtcagcaagcatgcacgtatttcagtatcccagctgtgctggattccagttacccagatatacagcatttcatgtacctccttctcttttgttaggtgtgcaagctatttgcagttttctgttttgagcatgactgtgatgaatataaccgcatttccgcacagtggtgactcctacctagcaaagggcctcctggacaaaaagctgctgggaatcctgaagcagtgcttcccagccccagatgccttagcttttgatttttatatttttgtatggatagattcatagttttattcattcggcatattaaaagttgtttacagtcattattgtttctgacgttcacatggtgaaagccccttcctgctagctcaggtcctccccgtggcccggtcagtctcgcctccagcacagcagaatgtcatgggatcaccatgggtgtccttgccgcacactggattgattcatttctccaagctgctctggtttcttgtaatggggaatgacatttagaagtcaagctgtgggtgctagggtgtttgtcgtgctcctggggcattttggtagacagatctaggaaatgttttcagagtgaatccatactggtatttctttctttctttctttytttttttttttttgagacacagtctcgctctgtctcccaggctggagcgcagtgacccgatcacggctctctgcaacctctgcctccggggttcaagcgattctcatgcctcaacctcctgagtagctgtgattacaggcatgtgccaccacacccagctaatttttgtattttagtagagatrgggttttaccatgttggccaggctggtcttgaattcagttgatccgccagccttggcatcccaaagagctgggattacaggcatgagccaccacgcctggcccatattggtgtttctaagtaaaaatcaaaggatttgtttacttgaccttttattgtacctctttttctcttaagcctgaacatgtgtgctacattaacwtacttatctgctctatcctataatatacttaaaagttttgaaatcatagtaccaatattacttctaacaatagatctgattgaaattgcctttcctctttgccyttagagtgtaacccactaaggatgcctggtcactaggctctaaagtcacgtggaaccaggcttctctccgtgtgcttctgttgtcagtttcatagatarctaggctgtttttgtttcattttcttttcaattttagaatttgctttyttcttttctgacttgtagtttttaaatatgtaaatatttgtatggctcaaaagtcaaagcaatataaaaagatctattcaggaaagcctcactctcatccctttccagcccattccccacccccatagggaatccgttttactagcttatcctttcagtctttctttttcccctaaataagcaaaaacgtgycttcwtttttccctttcctgttttatttacayrgaaggcatcttagtcagttgtctgrccatcgctcctctagtgggctgcgtggttctctgttggacagatgtaggragcttatccaaccagtaccctctggataggcaggcgcatgattacagggaaaggtccgggggcacatgctgtttggtatttgtgggctgtatcttctcactggactcctaaatatgggattcctgggttaaaaagtataaatatgtttaatttgttaactactgtgaaatttcatgagaattgtaccattctgtatcccaccagtactgtctaggaatgcctgtttctccagagtggttacttttggatttttgccagtctarcaggtgaaagcctggagattsttattcagtagtttgggctggggcctggccaygtgtatttttgaaaattttcgctggtgattttgctgcatggccagggttgataatgactgtgccagatttgctggatttcctttgctattcctgcacatagtttaaacgagactgccagcactgggtatcagtcaccatttttctttttgttagtttgccgtcagccttttctttgacctcttctttcagtttgtgtgtacttgctgtctcttaggccagacttctcgcttcctttctgctgggcctctgaggggtcatggggccatgacgccgtggccttggtctacaggtgtctgacttccggcagcagctgctggcctgtgctggggtggaagctgagcgcgtggtggagttttcctgtggtgagaagctgtgcccagggtggggcaggctagaggtcaggttctggcccccgttttctgtgggtaatacctcatacygtgaccaggcacagrggcggaggagaccccgggatgggagcctcacccttcgtgcgctcrcccaggctctcctgctttgctccctgctgcstgctgcccagtgtgactggcgatggtgggtgggtgagcgctgtcagtcgctgttcctgtgctggatgatggggcaggtaaatgccctctctgcagtgtcttacagcacacctgcatctccagttttcggcccctccctgatcttaccaggtcacgtgatccctccagacaacatctgcccctygtcatctgcagcgggatctccaaccagccgctggaattcacsttccagaaaagagacctgcctcagatggtcagtcccagccagctcgctgcaccacagcctggcctcaggcagcaaagggttttctggggcagggacgctctggcccaccctgagtgttttcaggtgttggggaaattgcacagggacacccacttagagccacacagaatgagcggcgtcgatctagatgcttatggaggaaggtctgagcttccccgcctctcacaccttaggctgcgaaatatgtattcataaaacctccaggcatcttctgaggacgcctcackcaggagaaagctgctagttccctttggctctcttgccctttggttatatctgcccctgctgggggcagggatgtggggcttgggggcatctcctgtggtgtgcctggggtgtgcagcccctgattgtcrttgtggtgcccatcaggaccctggacagaagaagggaggactcagtgccagggcaatagggaggcccccyagggacgctagtgctgtgacatgtgtcagaaaggcgcagtcagcagcagcggctgggtgtgtttggtgggaggtggcacctaccaccccgtggttcccacccaggggagccaagtcctcttccttggctgtagtcctgccragggtctctcctcagttttgagtctcaaggtgaagacgcggtttgtgggtggctgaggggttgctccatgggggctccctccctyccttccttccttagatggacgaggtgggtcgcatyctctgtaacctgtgcggtgtggttyctggaggggtggtctgtttcttcccctcctacgagtacctgcgccaggtccatgcccactgggagaagggtggcctgctgggccgtctggctgccaggaagaaggtgagtggcctgtcggcagccttgccacttgtgaggacagtgycactgagtcctcctgggagctcttgtgctcatcgggtcrggacaggcttytggctcctcatccccaccgctcccagtccctgactacagaggatttccccmaagtccctggctgtgaggttctccagtccgctggccagaaaacacaaggccacgagcagacccgagacctggcaccctaaacctgtctctgggaaatgtcctstgtctttctcagatattccaggaacctaagagcgcacaccaggtggagcaggtgctgctggcgtattccaggtgcatccaggtgcgggcgtcatgctgrgcttgggtctgagaccrtgtgggggtggcagctggaaacgtgggtgtcatccaagttttggctcagcaactcagcrtctgggtttctcctacaggcctgtggccaggagagaggccaggtgacagaggccctgctcctytctgtggttggaggaaagatgagtgaagggatcaacttctctgacaacctaggccggtaagtagtggttctgctcatctcctgggtcgtgatacatggccggccctcactcccagcagctgggcccctgcctgctstctgctgccattagagcccacagctgggctgcgactgctcagaccagccagctggagggaggggctcagcagctctgggtttggccctgagagagtagttggattttaggctggycattgctgtatcaggacccaatcaattggcctagacgggatctctcagccttacaagccctctccaggtggtaggtacagagtggagagaggctgagttttgatcacagtcggagagggctgacgraaggggtagaacggagcagctggtgacatgggtgatgacccgggagttcctgacgtccacccactgggctcttgtctccyccccacgtgtgtggtgatggtgggcatgcccttccccaacatcaggtctgcagagctgcaggagaagatggcctacttggatcaaaccctcgtgagtgaccccagtgtcacagagggtgacagagtaggcagtgggtgggagtggcatcacccccagggctgatacagccaggccttccccactgcgctggtgtctcctgccccctccggaagcttggatgcccctccacaccctcttgatcttccctgtgatgtcacctggacccctgctgctggcattggccacraagcctcctgktctggctccaaagcctggcagggtcttttccccgggggagctgcaggcagggaacrgtcctgatgggtcwtccccttcactcccagcccagagcccccggccaggcacmcccagggaaggctctggtggasaacctgtgcatgaaggccgtcaaccagtccataggtgagcctggctgcctccagctgggtggacagatgggrgctggagaaggggagaacaggaaagaggggttgcctgccctgtttcctatrtaagtctgaggaaggggagggggtcgccatgggaatgtgctgtagggggaggcaggtgttgctcggagcsccagcctctgttcctatgcaggcagggccatcaggcaccagaaggattttgccagcatagtgctcctggaccagcgataygcccggccccctgtcctggccaagctgccggcctggatccgagccmgcgtggaggtcaaagctacctttggccccgccattgctgctgtgcagaaggtcagtcctacctttttctttctgagagcctcccmaccccgagatcacatttctcactgccttctgtctgcccagtttcaccgggagaagtcggcctcttcctgatgggcaaccacaccaccgcccggcgccgtgcccttcctttgtcctgccctctggagacagtgtttgtcgtgggcgtggtctgcagggatcctgttacaaaggtgaaacccaggaggagagtgtggagtccagagcgctgccrggacccaggcacaggygttagctcccgtaggagaaaatgsgggaatcctgaatgaacagtgggtcctggctgtccttggggcgttccagggcagctcccctcctggaatagaatctttctttccatcctgcatggctgagagccaggcytcctkcttggwgtccrcaggaggctgtggcagcwgtggcatccactgtggcatctccgtcctgcccaccttaagaggygagatggagcaggyccatctgcctctgccctttctagccaaggttatagctgccctggactgctcactctctggtctcaatttaaaatgatcccrtggccacagggctcctgcccaggggcttgtyaccttcccctcctccttcctgagtcactccttcagtagaaggccctgctctctatcctgccccayagccctgcctggatttgtatccttggcttcgtgccagttcctccaagtctatggcacctccctccctctcaaccacttgagcaaactccaagacaccttctaccccgacaccagcaattatgccaagggccattaggctctcaacatgactatagagaccccgtatcatcatggagacctttgttcctgtgggaaaatawccctcccacctgcarcagctgcccctgctgactgcgcctgtcttctccctctgaccccagagaaaggggcygtggtcagctgggatcttctgccaccatcagggacaaaccgggggcaggaggaaagtcactgatgcccagctgtttgcatcctgcacagctacaggtccttaattaaaagtgtrctgttggtttctgctgagtttttyattgatatgtgctgctgttttctctggaagcctctttagggaatcgaggagcrcactggtgcaggggctgggtggagccatcctccgatggagcacaggcagayrgaagcccccaccccagctgygtggcctsaagccagcctcccgctccccgaaggtggtctccacacagamctgggacagttycatcccygccccttcctccagggcagcagggctgaggatcccattctggctgtgtccacgtccgggccatggctrgagtctgggtttaggggaggaaggcatggyggcgcccgctaggatttccagttgtcctcttcttcctctgcctgtggctgctgggggttagcagacacgrtttgttgtctgacatacgggctctctcytcccggcccctcaccagccccagaggtgaaaaggctggagggsaaaggstgagtgagggaggtctgtggggagcactggtttccccaggccccagagacttaaacacaggaagaaaaaggcaagagagaattaacgatgccacagcccatggcagacagcggccctgcctcctacscttgcgtctcaggaccagcttgttgaagagatcccacatcagttccctgccttggcttacggctctcactgcaataggaaagccacggagtggggtgtggggttcagtcacattkgacccccggctccgtgttcctgtcccctgtagtgtttttgttattagaccctttttyctccttggtttaggaatgggggccccagggccacccttgtccaggctccctctaccgtagaggtgagaattccagggcgctacartttgaaaaccactattttatgagccaagtagaacaagaaatgacaactattaaaaaaaataagggatttctgaccagctaacaaccccacagaaaatcyrccagggatccagaaatgagactgaggtggcctcagagagyggctccctcctgaaggggatgctgctgctgtcatcctgcccggcaccttggactgcagtgggcrgggcctggggtggggatgagggtgcactgaccagcaccgcagcagcttggggaggttggggtgctgttaacatgccatcktataggtcggaagtggaaatgggagaaagtgtggggtgcctagggaaggaggtgactgagtagggagcctggctgccatcctaacacmcagctcactgggcttgagagacttgagcctggtgccagggcagagtgggtgatgctggggcccaggctggcaccatacttgaggtctgccaggcaggtcaggtaggatggcacatcgaccttggggacttggcccaggtctggcgtgtagaagtagttctccgggacacacgggattaggtagggacatgtgagaggtgacagggacctgcaggagcagctagcgagacctcatgtgcaccctgcacagctgtggtggcataaggggttcaatagagcctctcctagagaggagcctggcaaggcccccagcccctgcccctgcccctgcccctccccctccctgtccacctgctgctccagctgctctctcattgatggacaaggggcactgaacagtttcttctctgtctctgcccccagcatcacatggctctttgttacagcaccaaccagttggtccgggaagacagacttcttgtatctacaggggcaacgtggaggtcaggcaagccagcacctgctgtcctgggaccatgttcctgacctacctctcccatgtcatcagggacactgcactgaggggtcccaggccaccgagccaagccaccctggtcaccttctggctcccgcctctgtgctgcacctgagtgtgatgccctgggaccccattaagtcaggctgagtcttgcacccacaccctgcgactccattttctgctacaaaggatctctctgatgttgacgagcagcatggagacttggggagacccccccaagcgcctcctccatgtcatccttgggctccagcttggcgctcacacacacaggaaaggacttcagcttctcctgggagggctgggtggctgaggggtggtggatttcggagttggaccagcagctggcctagaggctactggggaggagggagcagggagcacccactgctgatccagattcactccttccctcgcctctgtcatgaccccaaagaagcagatcctgaacctgggctcttgtcttcacctttgttctcttccactctggggtaattaagaatgatttgctggccaggcgcggtggctcatgcctgtaatcccagcactttgggaggctgaggcaggtggatcacaaggtcaggagatcaaaaccatcctggctaacacggtgaaaccctgtctctactaaaaatacaaaaaaattagccggtcgtggtggcgcgcatctgtagtctcagctactcgggaggctgaggcaggaggatggcgtgaacctgggaggcggagtttgcagtgagtggagattgcgccactgcactccagcctgggcgacagagtgagactccgtctcaaaaaagaaaaaaagaatgatttgctaattatgcaggcagctgatccagtgctgtgtaaccttgggggccaccagatgccaatcagtagaatgggagagaaggaaggatggaggaagtgaggacaaggggcaaggaggaaggtctgtccacctgtctcttytgtgcaggaggtgtccaagcaggaggagcacgtcacatccccactgaaaaagcccacagaaaatgaaaagcccacatgcttgtccattgctgcaggatgggggcaagtggagagggagaggtgtcaatgctcccaccttactcccagtcatggctgactcctccctttccttcgttcttgttcctaatctgtcaccatgtcctgtcgttttctttgtctcacccaaccctctgtgcctgmaaatcccctgactgcagcctcatccctgtcacctcctgactgtagttggtgacagaagaggaggctgcaccagtgaaggagcagggactccaggtctggcaacaaccagggatggggccgggtgggggtgacttggaccaggagaggggcctgagtcaggcagtcacatgcttcatgctggggtcccccaagtgaggcacagcccggggtcccgggaagaagaccaagcctcatttcaggttgcttgtggccaaagacaggacctgtgtacccaacaacccctgggacttttgcaggaaacagcaaacaccattcgctcactcgagttagataaacactgagcgaaaagtcactggagcccaaggactgtgcggggtcagtgctgccgatacaagaaccgcagccctccagctcggctccctcaacggcctgcgctgcagccacactggcctcctttcaggtcctccacctcagggctatagctcatgtgcttccttctttctggaatgtttttcctgacctacccactcaccgtgagatttttaccacaaatgctatttcctcacatccgccttccctgacccctgagaccaagctaggtcccccatgatgggcctcgcagcacctcatctcccctccacagaggcggtgataacccacagaacccagggccacgatccctggctttgaaccctggctttgccactcggccagatctctttctgtgcctcagtttcctcatctataaaatggataacagcagcgcctgctcataaaatgtggcaaggattaaatgagttaacgcactcagatcaatggtggagcaagctccatgatacatgaagattagtgattacaaaatactataaataggccttatcacaactgtaattaaataactgatcattaattggttatttaggtctgtctctcctgccagagtgtatacaccagttggacaaggacgctgccttattcatcactggatctatagtgatttgctcagtgccttgcacacaggcactgttgggtaaatattttctggctgcaggaaagagtgaaggactaacctccccaacccccctcccacccccgccccttgctacctcgtgggaggaagagcatgagttgggagagcagagccaccacaggaaaccaggaggctaggtggggtggaagggagtgagctttccggctctcaggagcgaaagcttccaagttgggctctccccttggccccttccacccagggaagacagctgggtccgccaggaccaagaatccccaaaggggctgctcccagaggttgtgttgcagggactggagagaggacttcccagtacagggggtggccctctgatcaggtgggggtgggtggcagcagagcatttggtgggaggtcaggagctcacaggagatgggattctgccgatgcctgctgaatgaatgagggagggagacggcaggaccagggactggggaattggtactaaggtgctgggtacctgccgggcactctgtccatacatgatctcagttcagctctccaccttggaaacacaagaaaggagccgtggctgcagagaaaaacagaggctggaaacaggggtacatgggcagggtggtggtggtgagagaattgccygaatcagctgccaaatggtgcccaggttggaaaagcaaatgtgcacacatgggttcttcccactctaaccctgaggaattmgaggcctgcttctgacacagactgggcagtggctagtgactctaggtatagagtrtccaggccctgctcacccaggctagagcttagggagccagaaggaaggaggtgcatgttggggtgcaggacaggagggaaaaatactcgaattgcaaggtgagggcacagtctatttatattgggttgaattaactcctccccctgatgccactaaagcaggaatcacactgcagatggcactgatttgattggcaagagacatgccaggaagaatattaagggaccggacccctataattaggcctaatcatagcctgttgtttgaaaagggcatgaaggacattcatcaggcctggcactgtgccctagacctgctctcctgggtagtgggaccctccgtggcaacagaggtgtgggtgggcctgggtgagtgtggcaagaaatgcctcggaggctctatttggccttaaagtgctgtgtgaccttggataaactgccctctctgaatctctggtcctttccatttcccattctccaggctgagaactgcactgtgatatatggttattcccataataataatgtgtgtatcatgcataatgcactgcacctcttcaccacgctggtgcccactcttctgctccccctgccggcttcctcagccccttctaccctgatggttctctcctttcctcctcaggccagcacttcccatgatctgagatgtccgtcctccttcctcttcaactttttctccagcagtgagttcctcctcctaactgaggcttccaggaaggatatcctctgcttctcagacctgaacctgccttgaatactcatgaggacccaggagctactcctcacctcccacttctcttccctcctgtcagataaccaaggcacggccaactgatctccaaccatctgaggaacccaaccgtgtgagaccacccacacctttcaagaatgttcctcccctccccttctttgtatttatactgatgcaaatttgctggccatcttaactcagtcctgtgcctcagttctcccacctgtaagatcaggaggaggataaagatgtaagactttctgcacacgttttaagatgaattccttgttaccacatctgagggtgtctgtgtttactgtactatccacgtgagaggattgtacagacacgaatctaaacaaggaagtagcaagtccattcaagcattaagaggctgattagtggtttattcattctgtctrcaagcatctactgatcatctattcagtrcagaccattatcacaacaaaggtgaataagacactatgcaatagccagggaaacagcctcaaaaacagttaaactctaatccagccatgagtacaatgctaaggagggacaaattcccttctagggctagggaagtcaggaaaaaacctctcagcagaatgtgtgcctctctaccaggcccagggagaaggtgcagagacagcattccaggtggggagcagtggctcacacctataatcctagaagtttggggggccatggtggaagaatcaagaccagcctggtcaacatagactcctgtctctaccaacaaatatatatattttaaattagctgggtgtggtggtgcaggtctgtagtcccagctgctagggaaggatgaggtgagaggatcatctgagctccaggaggtcagtggaggctgcagtgagccatgatcatgtcactgtactccagcctgggcaacacagtgagaccctgtctcagaaaaacaaaacaaaacgaaacgagagagcatcccaggtaaaaggaacagcttgaacaaaggtacgtagtgaaacggcaagtggtcttgagtggtggggacacagtcatccttgaggaagtaccaggaaaaagaatgataaagagaggccagtttgtgaaaaacacccaaaaccaaggctaggagtctggtcttgaaccaggaatgaaatccttagacctgtgctgtccagtgtggtagccaccaggtacatgcagccactcagcactggaaatgtggctagtctaaattgagatgtgctgtcagtgtaaatacacaccgaatttcagacttaggaaaaaagaacatagactatctcattaaaatctatattgattacatgctaaaatgaccataatttggatacattggagtaaatgaaatatattgctaatttcttctgtttcttttttttttcaactgagtcttgctctgtttcccaggctggagtgcagtggcacaatcttggctcactgcaacctccacctctggggtttgagcaattcttctgcctcgcctcctgagtagctgggattacaggcacctgccaccacgcccggctaatttttgtacttttagtagagacggggtttcaccatgttggccaggctggtctcaaactcctgacctcaggtgatctgcccgccttggcctcccaaggtgctgggattacaggcatgagccaccacgcccagcctctcctatttctttctattttaaaatcacatatgtgatttccatatttttcttttgttttctttttgccacactcagtgtcctgtgattccaaagaaatgaatcccagttcttttcaggcaggagctatcctagaatggattctggcgtaagcatcaaaatcattcataacattatcattttatggccccttcgttctgtatctggtagctcttaaactattatcatgaagataatcattattgtgcctctctcagcagatggtatttccttatgctacaatggtactacaaatattagctcataatacccatgtatgttagaaccattctaacaccttcccaagaactattccatttaactcttaatcacagtgaatttattattatctcctatgttacataaggaaatgaagttggaaagaccacatggcattttttttcaacattgaaaccctacttgagatcaagcccaaacttgaacctatgttgtctgactatagaacttctgttatttatcagtatgttttattatttttatacattaaaattgaagatcttggagtttaaaaatttttttagtactaccgattgtaagacccctttttatgatactttgtctttatgtaaacctaaactatactttttatatatatatatatatatatatatatatatatagacagaaaaacagagagtcttacactaaccaccccccccccgtgtggtcaacatttttgttactttaagatacaccaccccaattaacttcacaacaaactttggagtcatgtaatactatctatttttaggaatgagaaaatccaggcacaaaggttaattggcaattatcttttgcaaagtctgtggtgctcatctgaaaagatgacgatcacttcttatttagtggaaagacaataaatagttgataagtaatagtcttccatcagggagttttgtaatgagaaaccctgactcctcagttccccagtggatgactgcagttcactctcggtctttgctattgtgttacctgcttatccattttgttaccttttaatgcattacataaatgcataaatattctttaataatggtgctttcctcacatctatgccatccgtgttcatcaagatcttctttcagtttctttgacaactaaaactgtacatatgtattgtgtatggcgtaatatttctactgcacagcattgctttacacaatgtggtaaaaactatggactctcccaggaaaatgcacacacaccgtacccctgtctcataaggcagtttatagtttcaaagtgcatggagcccgtcctgcacaccattctcccacaccccgctccrgcgcctctcccygagttacagacctcactgtgggcccccggggaaccagcgcagaggtttaagcggtgtggggtcaactccaagggtcaggagttggcaactggttggttccccatataattgatgcccccgacacagcatctccccgaaccaataatagaagcttctgactccttcgcccacccttctgacttcttcttgcttctcccatggaagcaggtgtgggaaccgctgagcrgaacaccctcccccagcgggaaatccgggacacgcaggagcctcagtgaatccgaccattgtctcatctcaccaggcaggtgcctcctccatcctatgtgcgatcaactttattactacaattattaatataaagctgttgtaaccaagcgggtaatagaggaacgccacactttgagactaattcaggagttctttattagccagcgatcgagagacggctagcgctcaaaattctctcagccctgaagaaggggctagattttcttttatactttggtttagagaggggaaggggagcctagctatagcaatcttatagaagtaaaacaggcaaaaaaaagttagacaaatggttacaggaaaacaaatggttccaggtgcaggggctttaaatccatcacaaggtgatgggtgcaagggctttgggtgctatctactggatacaaatgcaggggcttaggatactatcacccgagcgaattcctgggaactgyggrcataacttgccacaggaccttatcagttaattgcactctgatgtgctgggagtcagcttgcacaagttaagtccttgaggaattgggtgggcaaggagctgcaagtgaaggagccaaaatggagtttgtctggctctctcagctaagggagactcaattcaggttaaaacaaggtagcatatcatattccccacttgttacaagagggttatattggactttaagatatataagtttgacagaagctatgtgttgctttataaagttaagaaaccagttttaacttacgaggtttgaagactaaacaagaggaggagaaaggggtcccgccaatccagtaattagagtagttagtcatggattacagttaaacatgctttggtactagggggtgttatgaatttgagcaggaatgctgtccactttcagagccgtcagtgtggtgaggatgacagtatgaggtcttttccaggcaggagtgagtcctttttttttttcttttggaactttttaacatacaccaggtcacccggctggaaagagtggcagagccccgtctggtcaggaactgggttgggatgagctccccggacaagcggctggatgatgtcttgtacctgttggagagactgcaggtactgtaataaattagcttgtgagatttctgctaaatgggtatcccttagcttaggcaagataggcggagccctcctatacatgatttcaaaaggtgaaaacctagcccggtaaggagtgcatctcactctaagargggctaaaggaaggagtctcacctaattttcaccggtctctaagatcaattttgtaagagtattttttagggtgtggttcatgcgttctacctgcccagagctctgggatcgagaggcacartggagcttccattgaatgtttagtgccttactgactgactgagctatggacgaggtgaaggccggtccattatcagaccctatggcagcaggcagcccatgtcgagggatgatttcattgagtgaaaacctaactaccgtggtggcagtctggcagtctcgttcttggtggcaaatgcctcagtctatccagaaaaggtgtctagtagtaccagaaggtatttgtactctgcctggtgtggttttatttctgtaaagccaatttcctaccttctcctggcgagcctccccggaggcggtggcctgagctgggtttaggaccttgcttggcgttcacctgggcacaagccgtacaccggagagctgcttggttcgctaagtcctgaaggtgggggatcttgaaacggctccttagaagctgggccaggtttcctccttctaaatgggtggtagaatgcagacaactgattaaagtttccccgagagcttggggtatgaagattccggaatcaggaagaatccaccaatcttcctgatttttactggcctgaagatccaaagcctatttttcctcctctggggagtattctgggtgatctggtaagtcaggttgcggaaaggacactgcaggcagcagagtcagaggcgtgactgggagttgagctgcctcccaggctgcagagtctgctctttggttaccacaggcaatggccatgtcttctttttgatgtcatttgcagtgaattacagccagctgttgagggagccaaacagcttcaagcagggccaaaatttcttctttgttcttgatagcctttcctgctgagatgagtagcccatgctcttggtagatggctccatgtacatgcacagtagcaaaagcatacctgctgtcagtgtgaattttaatacrttcgtcgttaccctatcggagggcctgagagagggcaatcaactcagccctctgtgccgaggtacctgctggcagtgcttgggcccacagtatattcgtctccgtagtgatggcagcaccagcctttcgaactccctgctcaaggaagctgctactgtctgtaaacacagtggcatccgcctcctttaaaggcacgtcttggagatcaggtcggccagtttccgtagtctctaacagttcttggcagtcatggacaggtgtggtaaggtctgggtcagggagcaaggtagctggatttaagcatcttgtgggagagaaagttaaatgaggctgatctaacagtaaactgtgatactgcaggatgcgggcatttgacatccatttgccagaggcacttcrtagtaaagtgtctacagcatgaggacctgtaagggttaaattttggcccagagtcagtttatcagcttcctggaccaggctcgctgttgctgctactgctcacagacaacttggctacttggtggaggccacagggtctagcctcttaagacaagtaggctaccggacgtcaccatggccstccactgtggcggtcaccgtgggctactgggggccaagagagaaggagccccggtctcgtcagtcatcagactcctccgctgcggggagggtgaggacttaatttttcttttctggtttttcctctggctttaatgggcattcttttttccagtgtctagtctgcttgcaataagcatgttggtttttctccaggggagcctgctcgcctttcttgcctttctggcggggacctggggttccctggccattcctctgtgatgggggcctttccttcttggcttcctggatggccgccactaagattttcgcatgtcttttggatgccttatcggcggccttttcagttgcctgagctgcccgttttcgcttttcaaactctcgattgtcaaaaactttctgggctatctctagaagttggctaatgttcattccagcaaatccttccagtttttgtaattttcttttaatatcagggcctgcctgagccacaaatgccaaattaatagcacagctattctcrggagccgccgggtcaaaaggggtgtaactcyggtaggcctcctggaggcgttccaaaaacgccccsggtggctcatcaggyccctggacaacttcaaatgtcttagacaaatttatgkgttttcgagcagctcctttgatacccgcaaggagatactggtgaaaatcatctaaagctctcttcctgcctgaggagtttggatcctaattaggccgggtagagggaaaacctcctctaggaggttatgagcttcctcctctggtctaccgtctgatgtaaggaaatattttctggcctctcttcgggtacgttccttctcttcagaggtggaaagggttaaarggagctgttgacagtcctcccaggtgggccggtgagtccggagcatggactccatcagtgaggtcaagacctggggcttttcagaaaagggggggttatgagtcttccagttgtacaggtcagaagtagagaagcsgacataaactaagaatgggcctgagtgcttatcgcccggagggacttgtgcctcctcagcgggaggagkggggctacctcctcctgccgtggccgcgatcaggaggcaataggtggagagcccacaggggaggtagtgsaggagacaagagaacattctgagggagcaggagggttataaggcggtggaactgggtgaaggaaactttcctcttcctcacaaggaggcaatacaggaggagccgagccggctgagggtcgaggcgaaagtgaggtctggctcaaaaggaccttggaggtagaattatgaatggcgcatgagcggagccgtggaggagggctccggaccaaactcagccattgatcaatgtagggaaactgatcggggtgaccgggagttccagcaacaacccgccacacagtctgaacaattgcgaggttcagtgacccttctgggggcgggggtgcacctgactctaaactttggccattctactccacagagtgtccagagtttgccttttttaaggcggagcctataatcctctgagaagcctagagagaaattttgtaacatacattggagagggctccaagctttatgaggccaggaagaagagtttcctattctggaggcagtttaacaaggtttgagcagagatattaaacttagcatggacagagaaattcatgacctaggggggctgtagtatcagaagaacagaaataacataaccagaaggagtggcaaaacagctataaccaacacttcctgccgcataaggtttgtmttcttaagctttgagacttagggagaggacacgtggcaggtctgaggcccgtgggacctatgtgacttccctctcccctttgacttataacctaaatatctttggtgtctccacgactcaaaggcaaagagttcagacttggccctttcttttaagggtttgaggagggagagaagagccaagtcttggaggcgctggacttgctgcgacacaggaaaacgagatgtgcagggcaagggatggcgatgaggaggaaaggggccacttggatctttcctaaggtaggagagtagtcacagaggataagagtccagctggagtgaagcagtacgggggtagtccttctattttagggttgccagataaaatacagtatgcaaaatcaatgtgcattggagaaaataatttattattagagaatacrtaatttctttagcataaatatgtcttgtgccattcttagtttgggacatacttatgctaaaaaattatttgttctttatctggaattcagaattaactaggcattttatatttttatttgctaactctggctaccttattctcttcttaatattcttcaactctmctagctttgccctccttccctgccccctcttctaggggagtcggatcgagttgtaaggagaacatgccctcccctcccctccccttcccttcccctccctccccttcccttcccttccttccttttcccagtttctatatactgtattagtcactaatctaagtgttctaggtacaacaaacaaaaccacatcaaaataatccacagctccccactgctctcagaggcctacatgctggtgggagagatggcaattaaacaagattagtaagtagggtagagaatattagagaggaagatgtcctgagaagaagaaataaatcaggaagaggatatgaagtgctggggagtgttgaaattttagatggggtggggcttgacaaagcctccctgagaaggtgtcttccgaggaaaggcttgcaaggaagggagggtaggtgtttgggggaagagcatctagacaaaaaaagacaagtacagtgcaaggttctggaggcaggcgcgcacttggctrctgtgtttgaaaatgagggcggtgcggctgcaggggagaggacggggggtggacaagaactatggggtggccaggtcctatggggctgtgggaaggaccttgaactttactctgaggagcatgggagccatcgcagagtattgagcagaagagtggcatgacctggctggattctttcatagagtccttctggctgtgatattactctctattagacaggmaagctccttgagggcaggcattgtgtcctattgacctttattataaggacatagcacatctagcctgtagaagacttcaatatgttttttcaaatgaatgaagaacgactgaatgaatgcatgaatgaatgctgtctcccgacagccagatcctggctcctaaggactccgggagtcttctcactgtcgaaggaaaactctggtagaggatgctgccagcagccaagtccctggggctcttagctgctgctgtggcagcaacacacatccaaacccgttttccttcttgccacatagcaggctgcttaatggatcactgtcacctggagggagaatttcaggggagaccctgccctgggctatcttctgattgatgatgtcatcgagcgttattaacaaaattatagacaaaggtgggaggaatggaggatttattaatggatggcctcaaaatttacaactatagattrtatttatcggttcaagccaagaggccctgtctacatttcaccttgacaacatctttgggttgarcctcatgcttctccttcctttaccacaggtcatcatctgtcttctccatagttcatagaacaaaaaacaacatgaagtcccrcaagagctagtatttcttgtgaggatttaatcctctgaataactatgaaatgggaagcataattaactccttttacagataatgaamctggagcttggagagttagtaccrtggccaagatctctgagataggaagtggtgatacccaggacaggaatctagatgctacgatgccagagtcttgaaccaacccctatgcctgctggccttgggattaaccagaaaaatgaaagtccagatccaattgcttgaatttgtttttttaaaaaaacttttattttaggctcaggggtggatgtgcaggtttattttataggtaaactcatgtcacaggggtttgatgtacagactatttcattacccaggtactaagcctaggaccaaatagttattttttctgctcctttccctcctcccaccctccaccctttgctaggcctcattgtctgttgatcccctcttcatgtccatgtgttctcatcatttagctcccacttatgcgaacatgcaggatttggttttctgttcctgtcttagtttgctaaggataatggcctccagctccacccacattcctgcaaagcacatgatctcattctttttctatggctgcatagtatttcatggtgtatttgcaccacattttctttatccagtcttccatttatgggcatttaggttgattctgtgaatttgtgtgttgaagcatagcatagcatagcatttcrtatgcctaaaaatatggaaataataagtgcgtggctcaatgaattrtccaaagcaagtgcacccagtaaccagtacccataagaaacagaacatcgtcagccctctaggagttccctcatgttgtcatctcaggccactgcgctggagaagagtctccagtgataacaaatattctcacttctgaagtgagaattttaatattttaattttaatattagtttaaaattttattaaatgaaatggtacagaataaactctgtcaggataatttattatatttgaaagtctcaygtgtatttctaaaggcagctatagttcactttcagttctgtatagcttttattatatgcgtctatatatgcaatatcatattttaggacttttgtatatatatatttcatgtmttctttttattattgatgtacatgcgagttgtttccagtttggaaaagtgctaaataatgatgtattgtagaaaagagaaaaatagtctaaggagaaactaaattaacccacagctccactattgagaatttacctcccttaactgtcatagttctggccatttgtggacgttcttttgcgtggtgaacagatgcaggcatttctaacggatctatacctgagtcaaattgtggggccatagaatgtatatgtccgtctttagaaaatattatcaaagggcttttgagggtgtttgtagcagtttacacacacagcggcatatgagagtcccagtcgctcagccccctcagcaacactcgatgttgtttttcaaataaaatgttatccattgcatagtggtatcacattgtggttttaatctgcatctccctgatgatggagaatgtgcagcacctttctctacacctgttggctgtctggccactctttgggaaatgtccggattgtttacccattctccccagtgtgtcgcctttcttcttaattgatgggagttagtcccacatcctacatgtcaggctcttgtcacacaaatggtaaatgtttcttcacactctgttcttgcctttttattttgttgaaggcatcttttgatgaagttcttagttttaataaagtccaaatgcatgtgcctgttctctgtgatgctcctgcctggggctgcagtgctagtactggtcaccagggggcagcagcctcccatgtccctggtgcccacggagctttgctggagcaggtggagctccgggatagcctcctgagaaaggcacctcctgttagtatcaatgatccccacattatgaggacaayggaagcaggaaggggtttaatcactttctccccgtgctgacttattcactcagcgactctgccctgagcactcaccttgtgccaggtggcctggtgggctcagcattggtgctgaaaatggcaaaggagtccctctccaccccaggagcccagtcttaggagacctgcacagaaccactaaagcaagtccacatgaaagaaaagagcaggtgctgtgataaaaatacggtaggatgacgggagggagggccggggagtcactgtgtggggagaatccaaatgcctcactgaggtgacatttatgccatggccagaatgacaatgggggaccaaygctgcccaagtcagggacagcrgtgtcagaaagaagccaccctggggcacagcctcacaggtggacctgagtttggcagaggaggttagaaaggggacagtgtggctgcagggaggctggggggagaggagcagagggagggaggagtcgggggaaatgagggtagagatctgcttgtctttgacaacattgtgcctccaaacttcgcaactttaagcaacaaatacttaatatctgacaatttgtgtccagcagaatctgggcacagcttagctggatgcctctgcctcactgcctctcctgaggctgggactgtggtctcaactgaaactggactggggaaggattaacttccaagctcactcatgtgggtattggcaggactcagtgtggactgagggcgtaaattcctccccgtctcttggcctgggcactcccttggcctctgccatgtaagcctgtacatagagcacctcataacagcagaactcgcttccccagtttaaggaatgcaatggagacygagagagacagagagagagagagagagagagagagagaaacaagagactgagagattgggggaggaaaaacagaagagagtgaacagcagaaaaatggcagctttggggataataaaagcataacagttgcaatagactgaatatctcccccctccaaaattcatatggcaaaatcctaacccccaatgtaatgatattaggaggtgggaggtaatgaggtcctgagggtggaattctcatgattgggattactagctttataaaataaacctcaaagagccaggcaggccattgatgccaggcactctctttgcagagctccatgcaggagatgggttcaacaacaccatctccttgaacgaagggcaggtgcaacatgccaycaaccayggccagtgctgggctagggtgagagcaggcacagaggggtctccacagacagagactcaagaagtccagggtggcccatgactcagacgcacaaatggggactccctgggctctgtccttcggctttcccacttgagtgacccacagtcccctcccaaaggaatctggcctccattagtacccagtggcaacttgtttaggtggaaagtccctgctcatctacttttaggaagatcagaggaagtgcttttgtgttgttttcactttacacaacgctatgattatctttgcatgttgctgctgtttttattgttttaacaacctaccccaggtgtctcctgtagcagacagctccactgtcctgccagactgcctccaaaccttacaagctgtcagtcttactggggaggttcttttttacaaagggtgrgggtgtcacacaaaaagagcsttcagctgctctatgcatctgtctgcaatatgtcacctcagagacctcacccccatagcaccatcggagaggagctgtgtcctcatatgtcttcataactttcaataagggaggcctctcaatgctgccggagcctcacatgataaaattctatttcgacatcagctatcttgtagcggtatctgatgcttttcagaataggccatgacagtttgttagcacttccatgatacagtgccacagactgaagggctttaacaacagaaatgcagtttctcacaattctgaaggcttgaaattggacatggagctgtgggctgcattggtttctctgaggcctctctgcatggctagttgatggtctccagctctctctgggtcacagggccttccctggtgcttcactgtgtccttactgcctctcttataaggactttagtcatattgcattagggcccgccctaatgaacgtaatctgtgtcacctctttatggaccacatgtccaaatacagttccattctgaggcactggtgttagacatgaacatgaactttgaagagtagacaaaattcatcctgtaacatatactaatgccttgcagaagacagactcccaggaaaggagttacttggtgaggaatatgcatacatgacattttcatggcttagtcagatgactttccaaaagggctgttgtggatacattgccaccagcagtcctgaatgtagctgcttcccagcatccagccacccctgggtgtcaagtcttctaatattttgtcaatccggtgtctgcgtgacaaataaaattccattgatcctttcatttccagcttccctgctgatatgtgtgtgtcacctttcggctgtatagtccccacttggattttctcctccctgagtcatcgctcagatccgtggcactgtgatgggctctttctcccacccaatgagtctcctggcattgggccctttgccgggtctgcaattgcggtagctgtttctcaagactgcctttatgttaaacaaagaarcagttattggctttaagtccaaagggttcttctagttttttgctgtgtcactgtctctaaaacagaggaggaaacaaggcctccccaggtccttttcctccgtgtcagcgcagaccaagcctcggggagttgagagggaaagtcacacagtagttcccgtgagcagttttggagctgccttcttacatccaaaagcctgtgtttgctcatttctaaaatgagggtgtgtttttgaggatttgctgggataatgctctttatacagtctatgaatacaagtccctgcgtgctagaagagaggccccaggcacgctcagttatctaggaaggttctggttggtgttcattcactaaacacacatatgttaagcatttactttgtgcaggcacttttatagatgactagcatattttaacaaacaaagcagatgccaacccctgggcctcaactccattctatccagggagtcagatcctcactggagacatcgaaagcaaggcacgcccacagagtgggagatgcaatgccctcctggcctcctctaggtataaacacttcctcccagattctgagcaggatgacagatcccaggaccaactctaaagtgggtggactctgggtccagaagaaggacttcctgggaccccaaaaggatgaggggattatacggcctgtggctggggagagactgacggaactctggatctcatacacctcataattcctccaagatggctgaggtctggggcttctgcaagaggaaagaagtcaaggtgagctgaagatggggcctcaygtccttgtcaaaggagaggggagttggagtcagagccggcccccaaaagacccatgcccagcacagtcacttcccagctctgcttgtcctcctccttcccacatccacctttcccaaccccagcaccagggggcccagacctgaagcagtgacgagccacctgctcacacgcctgcctggagccacagtcctggtgcccaggtacacgaagctgtgtgccctgggcctacaggaggagaatgtcagtgggtagctgagatccacaattgtctgtaaagtcctgctctatgaccaggtctgtccctgccaggacagcacaaagggcttggactgggatggggctgtcctctagacaggcagcagcacacaggtgctgtggatgagccgtgctggaggaaagaccaggcctctgactctgatgcccacttcctgcccccagcaccttctctttcattttggccacttggccagatcaatactctgtagatttctctcagcccccaagctttccatccttcaagcctaaggtgacctacatgtaggtcaagtggcctggatcaaagctgccgcagcatctgcacatttttcttgcctggatgaagcctctggagcccatcagatagagggagaggtagaggcagatagtgaggtggctgcagtctggaagattttctgaggtgtgggattttggggctggaattcccctaaattcagtgagttcactttggtgtttggaaagaccagtgcaaagtgatcgatgatggtaatcctatctcttttcccagctctgatccatatccagaagtaggagcatttccagtgctagctgttgagttagtgtcagcatgggatgagaaccttccagttacagtgctgcagttagagccacctccagagccttcttgcccttgtcctgggactgtgagaatcagtccagcaaggagatacctgacatcatagcatctgctgcaacctctcgcctcagccctgcagcaggaggctgaagagaagcagcaattggtgaggcccctgtccccaagccccatgctcctccagatcctgaacataggagttgtcacggagatggagagcagagcatgcraccccagctcctgggcctctctgaaaggcttcccaggggacaggcttgaccccgtgtgtctgggaactgcccctttttctcatacttggtgcaggctttgccttgttcatggcaggcttcctgrcaggaggtgaaggagcaggcagggtgggactccagcagctcctcctgctcccagaggccacctctttcttcagggactgaggtctgatttcagctgagcatctgggctagggtccttaacgggggaccccccccacagtatttcaatgtaagttctttmtattttcataagtgtcagctggctgagaaataaagagagagagaaagagtaaaaagagaggaattttacagctgggctgctgggggtgacatcacgtatcggtaggaccatgatgcccacctgagcctcaaagtcagcaagttttattaaggatttcagaaggggaggggctgcaagaacagggagtaggtacaaagatcacgtgcttcaaagggcaaaaaacagaactactgataagggtccaacaaagatcacaaggcaaagggcaaaagcagaattactgataagggtctatgttcagtggtgcacatattgtcttgataaacatcttaaacaacagaaaacagggttcgagagcagagaaccagtctgacctcaaatttaccagggcagggtttttccccaccctaataagcctgagggtacttacaggagaccagggcgtatctcagtccttatctcaactgcataggacagacattctcagaacggccatttatagacctccccccaggaatgaattcctttcccagagtattaatatcaatattccttgctaggaaaagaatttagcaatatcttccctacttgcacgtccatttataggctctctgcaagaagaaaaatatggctgtttttgcccaaccctgcaggcagtcagaccttatggttgtcttcccttgttccctaaaattgctgttattctgttctttttcaaggtgcactgatttcatattgttcaaacacacatgttttacaatcaatttgtacagttaatacaattgtcmtagtggtcctgaggtgacgtacatccttcagcttatgaagataacacgattaagagwttaaagtaagacaggcataagaaattataagagtattatttgggaactgataaatgtccatgaaatcttcacaatttatgttcctctgccacagctccagccggtccctctgttcggggtccctgacttcctgcaacaggtcctccaatatgctgcccaaaacaggctctttctggctgtcaggagggcggaggtatctggagggggtgcagcctccatagggtacaggtcccaaagcctccaagactagcagctgtgccctggggtctccatgcctccatcctgcccaaacacttattcatattgataagatttcaaatttatataataactttcaaataaagaatttgactttttaatgaaaatttccatgtcttctttacccctctatattgtcagatagcattgctgaggctatcctgaaaatacctcagagtttcatctttttgctgtggttgtttgtgtgattaaattacaatcattattgtaaatctttcaggtatggcttttagaggtctttgacctatatttggcattttttgactcttagatttattgtggaaggaaggctcatatggattcatttctgagtcagatcttaccaccttttggcatcaakaatttagcatcagagtttccagaaattatgtatgccacttgatatgtcagatgtcttagctagtctgggctactaaagcagcataccaaagactgggtggcttataaataagagaaatgtatttttcacagttctagagatggtgaagttcaagatcaagtcttcagcagattcagtgtctggtgagggctggcttcctggttcatggacagccatctttttactgtgttctcacatagcagaagggatgagggagccctctggagacttttctgtaggggcactaatcccattcatgaggtctctggtttcataatctaatcacctcctcccaaggtctcacctccaaagaccatcatataagggactggatttcaacataagaatttgagggggacaaaagcatttggtccatagcatcaggtaactcttgagtcatgtgcactcaaaataattctgtaatcttctgtgaatattcactggtctcctcttggttaaaaaaaattttttttaattgtaggtcttgattcagctaggtccaaagtttaacttctacagttgcctgcacaacttgtccacaggacaaaaggaactttagaagcaactgggcatttggagttttaggaaagttgttgggaggatttggggtctggacaaggagaagtagagggaggagaggacaaaggtaaagcaggaaagagatcagaatggaaaaggggaggaaggacccctgtatataagtgtcagctggaggacaaggaaggggagggtttcctaagaagatgagtttagtttgttgttgcttcagtttgctgagttgcccattatgtttggtcagataagtattttttgggacaatattttttaaattttttggagacagggcctcactctgtcatgcaggctagagtgcagtggcaccatcatagctcactgcagcctccaactcctgggttcaaatgatcctcccacctcagcctactgattagctaagactacagatacatacaactatgctttgctaatttatatatatatatatatatatatatatatatttttttttttttttttttttttttggtaaggactggatcttcctatgttgtccaggctggactaaaactgacttgaagcgatttttgtgccttagcttcccaaaatgctggctgtccaggtatgagccactgtacctggactaatgagaagattttttattccaaatgtcatttggaatcctctgcgtaccaaccaacaactactactcactgggcctgagaaatcttatttcctttcttgttaaggcacctctcaattgaggaattttgtttaaatcaaatataccccagagtggccacgggaggccaaatcttgatctagtgatgccgtttagaaagatgggcacgggaatgagcattgagaggaaagtacacacaaggagcaggagtttttcctagaagtgcaaaggacttgggcttagccagccccaggggagcaggggctggatgcttatgcacctcgtgcctgacagctgctcacctctgaatgaagacacaaacatttgtgcctctggcaggtagaaaaaaacaccatgcactctctggatcccaataagaatgcacagaaggaaggagaaaggagaacctaatcgagttttattggtgacccacagcacaatgtgtccaaacagatgcctgaccagtgagaaccccaaagtcaccacgtgacgctggctcagaaaacagccttttaaggcctatgactatgttctaccctctgattctccttgttatgacaacaatctttaatggcacaacacacaacagtatcataaagtctagtgaagacagagtagaagccctgtttacaatgcatggtaccattagggaagataaatcaccttttaaccagcacttttgtattttggctccaagcagccaaagaggagagacaagcatccatcacctcgtgcaagcaacaccaaatgccacaccaaccaaccaatcagggaggcacggactgactgcagcaggggagtgtggcaaagaaaacccaaggatgttcggatgaatctggggacagccatgtggtggtagagagcggtgcgaagtgttgcaaaagttatggaatgatggcttttgtagttagctgtgcattctcaattatatggcacttgaaatcttgcttccaatcattcccccaacctttctatttagagataaaatcctcaaagacagaagcaatgtttatttcagctgtgtattttggaagtggtttgtggaacctaacacatataagtgatcactaagagaatcagcatttagaaattcctatttgcacatggtatttcgtagtagctcatgctcttcagctctgattcctttcttcaaaagcttgcaataaacctggacaagaattgtatggtggtatcggctgccctacttttaaattcccttaaaaatgtattaaaaggttgattagccagaatatgtaggacttaacctatcctgggatcacagcatttctgaagctaaggttccttaacttcaaaaaagcaccataaaaggataagaaaagacaacaacttgacataacatatattttcttataattgcagtctgatgtcttgaacagctgttgcctgccaaaatggacaaagaaccaagagcagctgcaggccacgcaccaccactgggattgctgtgaccttcctgccttgcccctgggtcttaaatcaccaaactctatggctcacactgggctgacactgctgaccttacagccttgcaaatgatgtcatcaccatacgttcttcactcatgacgtggcatggatttgaccaaaggygtgatcatgtttaaaataaaaaccctttatgagagttcccttgtgcaatgcttccagtgtttaggcactgctgggtcaattttctcattattcacataagcttgcatttctgccttaagaacccattgtttgagtcacttcttatggtccttatcacttttgatctcgtgttagagcaaaatgcacactgccatcctctccactagtttrtaagctcttgaagcagggctgagtcagactcatccatagatccccygaagtgcctggcactctccaagtgaatagaggcacttaataaacttcagtagaatcagatttaatttaatggaagttgattaaaattcactttctccttctcctccttcactgcacaggaaattcaagtcagcatgagctgaagagcatcttcagcatcgaaactaaggaggattgtttttcagcttcttgctgtagctagatgacatgatggcatttagtgttccaggcctgcatttgaaacctcgacatttaccttaacaaggtaggtgaccctgagcaaatgttttcacatcagtaaacctcagtttccccatctgtcagcttaacaattgtacggatttttaacaggataacataggtgtcaagcatccagcatagtccctggatcacaatgagcatatgatctatcaaagttaccaaccacatcctgcggctagaattaagctccactgtggtattacttgaacctaaacttcacactgtgaaatagtactgtataaagaccacatayctaaattggaaactcaaagtttaaagaaaaaaaagactctcacactccttaattgaggggaagttaaagaatattgaccattacattcagttggttataaattggcaaggatgtagagtggtttgtgtgtgtgtgtgtgtgtgtgtgtgtgtgtatgtgtgtaacaggtgtataggcagagtgcactttttttttttttgagacagagtcttgctctggcacccaggctggagcacagtggcatgatctcggctcactgcaacctccccctcctgggttcaagcgattctcatgccccggcctcctgagtagctgggattacaaatgtatgccaccacgcctgtgtaatttttgtttttttggtagagatggggtttcaccatgttgcccaggctggcctcaaactcctgacctcaagtgatccacctgcctcagcctcccaaagcgctgggatgacaagtgtgagccaccacacctggccaggagtacatttttaaaacagaggttggtctactaatgtgaatgtagaaaaccctgcaatatcgacaatgtgtttaggggttgtatgtgtagtaaatggtttgcttcactcaatatctaaaagaacaaactttgttttttaaatattccttgatgggtttcactcttattcattttaactcaaacctccactcctttactcaagcttaccacccggcaccctcggtctcagctgacacctctgccatacatgtcattaggaagcttgaagccatccctagccttacccatccccagtctttctcttgctgccctgcatgtggtgttcctcctcttttcaagacaaagctgctcacctgaatttcccttcctcagctcctgccaccttcaagaccacgctctgtcagttatcatctctctcctaaatttttaacttctctctttttcctctgccagatgcataaccaagtctgtcagattaacctataagctccttttcaacccatttcaccatctggtcatagcccagttttagcttgccccattgctttactcaggacatccccaaatctgctgttctcaccgctcccctgacaaaaactttcatctgagatgagtctttctgtgtagatggagctatcacgtattttgttataacctgacagcattgtgaacagggccagttgcttggcagggctagagaacactcttgtagaaagggatagatagatgagcacacacctgctggcccacgggtgatctgctctagggaggtggtggtcatctgatgcactccatttgcagttcagcccatgtgtggagtcatcttctcctgccaacattcccaagagggctcaccactcaccttcagagtcaagcagttgtggatggaaattgacaggagtaagtaagcattccatcaatatttgacaatcactaggctaagtgccaggtttataacaatgaataggacaggtgggatgtctcccatgcagtttactgtttgcccacgagcctttcccccattttctacctccagtggccttggtgctctggggcctattctatgcctccactgtcactggctctatgtgtttgctctctgcagctagccttcctgctgttgacagtgtcctcccttgtcatcacagttgattgacccagaagctctgactggagcagggagggcttggagggtcagaaaaaatactattaattatagagagggttaaattgtttgctcagtgtcattcagtcagtaccagagataaaaactccccaaatccctcagattaggtcaaatcctgccataggcacctatagtaccttgcacctcttttttttttgtaacaatcatcattcttgtagctatttgtttagtgcctgtgttcaccggagtccaggctctactagagctggtatcacatctatccttttcactgtgcatctagcacactcttggtatagattgctggacaaaaatatttgattttattttagatttttaggcaccttgaaatttttagttaactgttttttaaagcggtttcctaaatctgcaaccatttcccttgcataaaatgggtttttgagtcaggagatcaggcactactgcaaaaaagggcctaggatccaaggcagatttagggagaaggaaatgttctaaacaaaaacaaaaaccagtggagccagaggtgtggataaggtatacgataagctgtgtggactcagaggtcctgggtgtgtaataacacaagatttcctccccacggcacacagctgcttgtgctcaagtcctgccagttgacagaaagctcccttgtcttgtgactactgcattaggcagaaggagcaaagaaagggcacaacggaccacgggcaaggtaaggagggaaagacagttgctttgaaaagtcaccagcagccgaggatcaaggccctttcagacctggccctacatgttggggaggtacttgagagcatcctttaggaggaggcagtagggggccaatgagattttgaggacagagcagctgctcacactagagaggccagaaatcctgaggttggacagaatttgctattgtttggatggtgcttcttgaatttttattcttttttcccctagggatatggctgctgtatattgttaatgatcagctggtttggtttctgagtactttcagggtgccaaggctttgtatgggttcctcagttgcaaataggttcatgcagtgacttccccagacactgcttcttgtgatatagttttgtttgaggtgtaatttaggctgcagtctagtagatggcatttaagagtaagaactggcaggtaggggtggggacagaggcaatggagaagtgtgtgtttgggatttaaagaacctcaagaaactgtgatattatgaaatatatatctggtcttcatcttgattcctggcataaaastcctataattcttggaatccaaaattttaaatctaaattgcgactgtaagaaaataacgtggtgctgccttgtgctgcctttcattctaaatggattttgggtgacaaggtttaacagagtagaatcacaggaatgattttctmatttctcaaagtgagatagtttttatcttggaccccccaaacattgaagaaccctttcttatgtggatttctaaatagtgtacagcacagtagtagggtttatttcctaaatggtaaaacaaaatcacagagaatctgagtaaccttggattttcctgctttagccacttggcagagactaagctttctaagccaaggaaccagacaatcacagcgttattgggtaaactgtagctgaccttgtgtaagccttctctggggtaacatatgaccatgatttataagtttctcccactatcaccgacacatatttttctgcttttttggtgtgttttctgttgtcctctttacaaaaaagctaaaggctttttttgagagacagtaccaggtatttactatggctgaatgcatcatacctaacatcactacatatgagacatctcttcaaaactaacaggtgacagaaaagacaacccagtcaactgtgatcaactaggaagtgaaaaaatatggagctccatattttaatatgcacaacctgaacaaaattgtgagaatatagcacaggcatgtgtgttacagatgccatgataattctcacaccaaattgtaaaaaaaaaaaaaaaaaaaaaaaaaaagcaaaccctaaagtgtttaatgtgcctcatatctttgctacatcaaatttttggatcagaatttataagatctaccagaaaagtatcaaaagattattctcttgcagtgcaggttatctacacactctatgttctgaatgtgtccttttaaaaatgaaaaaattcacacattttaacctgaggcaggaaataacaattgtgaagcctcaagcaagcatttcagtttagtggtggtgagtttgaggaagaatcagagcccctggtatttctctcagcaggaagtctgaagtctgggcccagaagcaaaactcagttgatggaattttgtctacatcaggaaaaaatgaatttgggatggactagttctcagctacatacaaccaagagtattaaaattataattcaatcagagagaccataacagttcattcctttggaaatcatacaataaatatgacatctttttttaaaaaaatttatttttgttgaaatgggagtctcactatgctacccaggctggccttaaactcctgggcttaagtgatctgcctgcctcggcctcccaaagtgctgagattaaaggcatgagccaccatgcccagcctgacattatattttctaaactaatatacagctagaatattatgcactctctgaataacagaaaaagaggttttaatataggtagattttttaactttaataattttaaaaaccaaaaagtttaaggctttaaaggaataataatcaaaacctataaagttacaaacaaagtacatttcttaaatatctaccactccagttctttgaatactacaattggttgcacacattaaacttgtgcggcgattaatgctttccatgtcttttccatctgcttacagttatgccacagacctctgggcataaggactagccaggtctgtctaacacatacttcggtgtgacttaacaaactggtttctactacattcagcctgaagtgacagtgctttttaatgttggttgcaggcaggggactgttgccccctcccaagcacttcagcttccttgcacggcctctccttggcttctgtctgtccctgccagcagcatttcatgggacccatcctgaccctccaagaaagcagaaaagggggttcctgatgtaaaaagtaaagaactatcatctgaagaaggtgagtccttttaaactgtgagtcctggagccacgttaaaatgagagcaatcacaccttactccctgctttgagctatgtgttcatctcttaaaactgcttgctattgccacaagtagctatcaattaattttaatttgggataattagcatagtgtcttatcagaactatagcccatattctttagcttaacaatggatagccaattgctcatcaattttatttctgtaaaccaaagagagttcctgatcaacaactttgtaccagcccactctctctgtcccccttttgtctttaaaaacctgcttggaacaaaggctctaggaagctcacagccaagggtacttgggtctgagtcttccaggcagctgtcctcactttggctcaagtaaactctttagattgtactctgtgtctcagcttcttcctttcaggtggatactgaggggagtaaatgaatggctcctgctctttctctgtctgaagcttggactattcatgagaggacttcctactccaagacataagggagtcttgctcagaaggaggagctcctgtctgctgaggacacrgttccatccaatgaggtcagcagggctatcagcagcttccgttaattccgttggggcaggcgcttggcaagcggcagttatttgagctgaggatgctgggatagattttaacatgagcagttggcccttagatcatgagaccagctaaagtgcccaaggaaatggaacagcagggagaggggacatcacacacaccaccaaaacctcttgttagtctctggcttccatatccttccccaaaacctcagcccaactcagcctcatttttccatctcttctcccttcctccatgggagagctttctgttggcacaggaatagctgagaartgggaaagatcaagtgtagtaaaagctgccccagataatctacagaaaactttgctggaatgaggttgtgcatctctgaacctgagctagatttgttgggtcagggaccatatttaactggctcaagaactgacacaggaggtgtctaataaatacttgttggatgaataaacagctaagtgagtgcttacaaaagcaaagctccagtaccctcaggccacacctactggaaaaatatatgtcagccccagaaaattgtgggcaagatgaggcaagtcctgagcaacacaggaaactgccctcctccttttctggccccgcttccactgtgatgctaaagatcgcatcaaggctggtcatccaatcagcaggatgtaagagggtcattcttcactgtggccatttagaagtttcctggaaacctggctttctcctgaccattgccccatgagcatggtggtgacaagcttgggctctgaaatcagacagccccaagtttgaaacctcaatattcttacttgctagctatgagactttgggcaaattcacctctccaaatctcaatttctcaatctgtataatggggataatattgggtaatgcactaagcaccatgtcaggaatgtagttagtgttcaataaacgtttatctttattrctgcgaaacctcattctgccattcccttctttgtcttcctctcccaaccccccagcttcatcatggcctatgaacagccaaagggtaaaatgatcagaaaactggacagtttttgacagtctgtaagtaactactgtggcctactcaactgcctggccttttgaaaagcacacttagaagctggtgatgtccatgggaccacataccgggaaatgacagaggtgtatatttacaaagtaactcttgacccaaagtacctctttaaaagaagacaagcatgttttgctcccatgatatcttatagtggcacctagattgctgagggcctgttgtccagtaagtaatgtcacctagagggggtatgattggtttggagtctgggtctgagaactggggtaaaccacttcttcatgtcgtagtccccttatacataaaacagagggattggaccagatggatcactaaaggtccttccagtgttaagacttaaagggtaaatggctctttgataaagagagatcataaaaaagtaagatccacacagcttaacctcccagggggcaattaagatgctttaatgtgaagtgaatgacgacgtggtagagtttgatgtgaatgtaatagcataggaaggccggagggcatgggggcctctcaacctcattctctgtactagatgcggcatctggagcatctcaagaggggctaagagattctgtcctcaccccagctctgaagatgcctccaccatgagaaagagacagggagcccctgactctctctgctccttcaccggttactcccacgttggaaggcaggagaggagcaaggccccagcatcttccatcactgctgcagacaccaaccaaccctccttcctccccacctctgcttcaactctcacctgagtccccgccccaaatagccctctgctagccattaggtgttagctgcacttcacttgcaaaaggttttcctctgccaatttttttttaaatttaaaagtaaactttaatattgaaaatgcaaacttggggagggcagaaagatcacacacaaggctgtcgcttcacacttggagggttgcacagtggctgggcaaaggcgctcctcacttcccagacaatggggcggccaggcagaggtgctcctcacttccgaaacagtgccttggccgggcagaggcgctggtcacttcccggatggtgcggcggccagggagagacgcttctcacttcccagacggtggggcggccaggtagaggcgctcctcactccctagactgtggggcgkccagggagagacgcttctcacttcccagacagtgcggcagccaggtagaggcgctcctcacttcccagacagtgtagtccctgggcagaggggcacctcacttcmcagatggggcagcgaccgcagaggcactcctcacttcccagacggcgggggagccaggcagaggagctcttcacttcccagacggggtggcggccgggcagaggcgctcctcacttccgagacggggtgtccttcgccaatttttataaaaaattttggcatagtgcttgcataaatttgcaggttgtattcaagacgccttgactccaataacataagagaaaacacaatgagggcacttgcagtcaaaggaagttttcaggagggcacacttgatttgctacacggggctgggagaggcactgggtatgtgaggctgggatgcccacgatccaggaatacagagctttttcaacgttggcttgaagtcatggctaataggcagaaaaaggctcctctcaccatgagggaagactcaggaggtgtggaggggaatggggtccatttattccatccaagatggggcaaggaaggacaggaggaagcccaagtgtggagctgtttcctcccaatagtgaatatctggtaatttacccagaagttctgatttttctttttagtcaaactaggttctgatttccaagataaggcgaaatccagagcagtttgggaaatgaaggaatctgactgaacaataagagtcagaaccrttgccctaccataagcaacaccttaacagaaacaaattcctttgtccgttcattctatccacagactattttcagagaagagaatgtcccagctagaaatgcaagtggacgagtgccaacccgatgaggccaatgatttgcgagtggagacctctgaggaacttggtaaagaaagcagggctttggccttcgcctgggaggcttgggacccctgaccaccccctgccccatcaccaataaacagacaggaaggaggaattcagggacagccttcagaaaggagtggctatccactggccacagcgatgactaaagagaggttcatgccacagcagaacacaaacggcgccaaagctgtctaaagcagacactgagtttattatttgctgaagaaggggagtgacccatttcattaagaaaggtcagaacagctctccaaactgaaggtaaacaggacggacacactgtggaaaagaggacattttgtttaaaggtctgattggcttaattgtaaactctcttgagggagtggctgctgttctggttgtgtgtcacagagrcttgagaacagctcgcaggagatcctggatgatctgacctgtggtgcacggccctggcagcctggtgtctgtgcctcctctcgttgagatgagatttttctctggcacccacttgggttaagagtgagaagccctggggcccatgggcctgctgcatgactctgtacccatcacctggcacatatgcagacttcctggtcacagggatgaggaaaccacatgaaaagcagttggagaaatttgttaccatgcagccatcctattttctaaacaggaaaactgagttgcagagagcgaagccccagtaagttggaggatagatgattaaaatgctgctgaataagggagaaaaaggcaaactggaaagacctaaccccaaattagtcatgtccaaatcctggtaggaagattacaagagatttttattttctctcctgtatggattttctatattattcttttctgttggtattctgtattctccaaatttttttactatgtgtggttttgaaaccatatttacaaaaatttgaagcatcaaagatgagctcaaggtcaaggtcactattaagtcaaaggcatgcatagatcaggcacagtggctcatacgtgtaatcccagcactttgggaggctgaggcaggcagatcactggaggccaagagtttgaggccagcttgggcaacagagagagaccccatctctactaaaaattcaaaaaattagctggtcatggtggcatgcacctgcagttcagctactcaggaggctgaggcaggaggattgcttaagcccaggagtttaaggttacagtgagctatgatcccttctccgtactctagcctgggtgacagagggagaccttgtctctgtttaaaaaacaaatctgtgcttagcaaagtcaggatattttcccagaacaggagttgagaattcagagctggtggctaagtctggcagccctatgctggctagagcctagggctccatctccagcgtcccagtccaattaccctcttccttgttagcaataagcaatgcacttcttcaagctagcatgctgctgtctcctctattccaatttcttgtcctcgctgttcactgccttgttacctggtggccctgtccaacatcaaggactcaacctttccatttcctcccaggaccctcgctgagtccccttagcctcttcacttgcttctgcatggcccgtcctgtcagttatttcagcaatccctcatccccttgacctcaccgcctgcccctggggacaatcacaagaggactccatttgactcagtccagctgccgccttctctgtcctgcctgaagcagctgagcgctgttgagaccacacggcctcatggatctagacgggcatgagctccyggcctctgcttcatccttggtgctgcccgtaagtcctgtggtctctggccagctttatgtcctactcccccaatggctataacagaccttcaccagtctcctgaagatttctttcctactgactcgcccctccccagccctagctcacaatgaacttaccctctgcttcaaggtagaagtaaatttccttatgtggggggaacgttcaaaatttctagcctccctctgcagagcccctctccccggcagcctctccttctacagctgtgggaggaggccttacttttgagtaaagctaatgcctcctcacagcactgagtcccctctcgtccccatttctcagggagcttattccatttctagtcctctcgtattttaaatatgaagccagaatacagccatggaactgcttctccctcagagcctccagtagaaactcaccctgccaacaccttgactttgcacttccagccagccctaggaacccaatacaccaactttcaagggcctcatcccactgacgtccaagcaggcctagatctatgtatgtgttgtctcagttctgaaagctcccatgagcctgcagagagactgcagggtcttcctgaatcgtgcctgaggatgagagggagacttagaggattgcccagatattgttccaccatttttctaaactctgctggcctctccccctcccccaagaaggcttcctgctaaattctgccctgcaagttggccctgcagcattctcaagtgctgcctgcccctgtgaacttaaatggattgcgctgttctttgcacaagagcaaaaacatctgcctggagtgcagcttgtcctagtggctgggacttccctgatacacagctctcccccatctgctgtggagtggtctcactgacatctggggaagcaactggaagaagcttcatccctatttccaaaggttcacagtgactggcagctggtgttgagacagacccgccgccttctgtaggtggactttggtgctggccttggttgtctttttatggacatattgtgaggagtgtgattttcgtcctcctgccccagcagtgtggcagtgcattttttattctttcaagcaggttgtttcatggtgtttcttggcatacgatgggaacagaattaaagatatgcctcttttggggcgtggctttggcaccaaaggctttccggaaggagctgctcagaccaaggggggctcccctgctaaagatgggagggaggagtcaccaggagtggccaccttacctatggaattgattgtagccatcctaaggaaggtctatgggctcttgaggaaggcaaaggtcttgtataataactgacccacaagctgtcttttgcctgtcttttgccaatagcagtgccaagctgtctctggctattgggcagctgatgagcaccgtcatgaaaaagtggggccgagacgtgctgcaagtagtgtggcgctggggcaggagctctgcctgcagaacaggggccaggctccctcctggctctgtcactcagcaggtgcagggccttggccagtcccctgtcctgtgttagtcatgattcattcacctatcaaatggaggcttggcctgagttttctctgcagtcctactgagctccagctttttaaattctcacctccctactgcctcctctgctgtgggccagtttctcagctacaatatccatgttcaagggtgtaggcagtggaaggcctcataggcagggcacagggaagccttgtgggttcattcatgcagctttcctgagacagctgggggcttagactgtgactgcaaaccaacaagctggtggagtgacggtggccttggaatgcttttcmtttttaggttgacatgttaaaatgggaaaaatctgcttacaaatctacatttcccacttcgctgaaagaactttaaaatggggtcacttagaacaacctggactctctcacaaccttcctccttctctttctgagtctcttgacacacctggccttcactaatttaggtgacttgcctggtgtagctactagaaatggaagaataccctgagggcatctgggaggcattgccctgtagtgggcttcccagagaccatgtgttagggatgtgagggccaggccagagccttgctgcccctcctgcaatgccagctgtccctgcagttttgtgggtggaaagttgatcccagctgacagtggcagccttgaagtgtctccaggagggtctggtacctcttgagtgttggaagtaaatgctcggtgctgccaagtgaaaatagcactcaggcaaaagttttctcagcaaggcaatttacttctacagaagggtgcatctcacggatggagcaatggcaagagcacactggacaagggaggggaaggggttcttattcctaatgcagctagtccctactgctgtgtctttcccctattggctggggttggactgcacagtctaagctaattccaactggctattttaaagagagcaggggtatgagccagagaggcggggtgagtagttttggtgggaaggatggttacagagcaggtgactaaggatgactaagaacacagcaggtgactaaggatgactaagaacacagcaggtgactaaggatgactaaggacagagcaggtgatagaggctgggagggggttgtttaccaaaactaggggcaaagagacgtaaagaacaaagttaaactttaaagtggagaacaaacaacagggaagctgaacatactgacatgttggttctttgaagaggaactcagaactcattgtacttaacaattttccccctcttgaattttttttcaagtttctgataactttatttctttttctttttattgtacttcaagttcaagggtacatgtgcacaacatgcagttttgttacataggtatacatgtgccatgttggtttgctgcacccatcaattcatcatttacattaggcatttctcctaatgctatcccttccccagccccccactccctgacaggccccagtgtgtgatgttccctgccttgtgtccaagtgttctcattgttcaattcccatttataagtgagaacatgcggtgtttggttttctgtccttgtgatagtttgctgaggatgatggtttccagcttcatcaatgtccctgcaagggacatgaactcatccttttttatggctacatagtattccatggtgtatatgtgccacattttcttaatccagtctatcattgatggacatttgggttggttctttgctattgtgaatagtgtcacaataaacatacgtgtgcatgtgtctttatagtagtatgatttgtaatcctttgggcatatacccagtaatgggatggccgggtcagatccttgaggaattgccacactgtcttccacaatggttgaactaatttacactcccaccaacagtgtaaaggcgttcctatttctccacatcctctccagcatctgttgtttcctgacttttttttttttttttttctgagacrgagtctcgctctgtcacccaggctggagtgcagtggcgcgatcttgcctcactgcaagctccacctcccgggttcaygtcattctcctgcsacagcctcccgagtagctgggactacaggggcccgccaccaagcccagctaatttctttgtatttttagtagagacggggtttcactgtgttagccaggatggtctcaatctcctgaactcatgatccacctgcctcggcctcccaaagtgctgggattacaggcgtgagataccgcacctggccgtttcctgactttttaatgatcagcattctaactggcatgacatggtatctcattgtggttttaatttgcatttctctgatgaccagtgatcatgagcattttttcatccatctgttggctgcataaatgtcttcttttgagaagtgtctgttcatatcctttgcccactttttgatggggttgtttgctttattcttgtaaatttgtttaagttctttgtagattctggatattagccctttgtcagatgggtagattgcaaaaattttctcacagatggtagtttcttttgctgtgcagaagctctttggtttagttagatcccatttgtctattttggcttttgttgccattgcttttggtgttgtagtcatgaagtccttgcccatgcctgtgtcctgaatggtattgtctaggttttcttctagggtttttatggttttaggtctaacatttaagtctttaatccattttgaattaacttttgtttaagatgtaaggaagtgatccagtttcagctttctatgtatggctagccagtcttctcagcactatttattaaacagggaatcctttccccatttcttgtttttgtcaggtttgtcaaagatcagatggttgtagatgtgggttttatttctgagatctccgttctattccattggtctataaatctgttttggtaccagtactatgctgttttggttactgtagtcttgtagtatagtttgaagtcaggtagcatgatgcctccagctttgttctttttgattaggattgtcttggcaatgcgggctcttttttggttccatatgaactttagttttctccaattctgtgaagaaagtcttttgtagcttgatggggatggcactgaatctataaattaccttgggcagtatggccattttcacaaatattgatttttcctatccatgaggatggaatgttcttccatttgtttgtgtcctcttttatttcgttgaacagtggtttgtagttctccttgaagaggtctttcacatcccttgtaggtcggattcctaggtattttattcttttagtagcagttgtgaatgggagttcactcctgacttggctctctgtttgttatcggtgtataggaatgcttgtgatttttgcacattgattttgtatcctgagactttgctgaagttgcttatcagcttaaggagattttggcctgaggcaatggggttttctaaatatgcagtcatgtcatctgctaacagggaccattttactccctcttttcctaattgaataccctttatttctcttgcctgattgccctggccagaacttccaacactatgttaaatggagtggtgagagagggcatctgtgtcttctgccagttttcaaagggaatgcttccagtttttgcccattcagtatgatattggctgtgggtttgtcataaatagctcttattattttgagatacgttccataaatacctagtttattgagagtttttagcatgaagggctgttgaattttgtcaaaggccttttctgcatctattgagataatcatgtggtttttgtcattggttctgtttatgtgatggattatgtttattgatttgcatatgttgaaccagccttgcatcccagggatgaagctgacttgatgttggtgaataagctttttgatgtgctgctggatttgatttgccagtattttattgaggatttttccatcaatgttcatcagggatattggtttaaaattctctttttgtgttgtgcctctgccaggctttggtatcaggatgatgctggcctcataaaatgagttagggaggattccctctttttctgttgattggaatagtttcagaaggaatggtaccagctcctctttgtacctctggtagaatgtggctgtgaatccatctggtcctggatattttttggttggtaggctattaattactgcctcaatttcagagccttttattggtctagattttctagtttatttgtgtagaggtgtttatagtattctctgatggtagtttatatttctgtgggattggtggtgatatcctctttatcactttattgtgtgtatctgattcttctctcttctttattagtcttgctagtggtcgactaattttgttgatcttttcaaaaaaccagctcctggattcattgattttttgaagggtttttttgtcattgatttttgaagtgtctttatctccttcaattctgctctgatcttatttcttaccttctgctagcttttgaatttgtttgctcttgcttctctagttcttttaattatgatgttagggtgttgattttagatctttcctgctttctcttgtgagcatttagtgctatacatttccctctacaaactgctttaaatgtgtcccagagattctggtacgttgtgtctttgttctcattgatttcaaagaacatctttatttctgccttcatttcattatttacccagtagtcattcaggagcagcttgttcagtttccatgtagttgtatggttttgagtgagtttcttaatcctgatttctaatttgattgcactgtggtatgaaagacagtttgttgtgatttctgttcttttacatttgctgaggagtgctttacttccaattatgtggtcaattttataatawatgtgatgtggtgctgagaagaatatatattctgttgatttggggtggagagttctgtagatgtctattagatccacttggtgcagagttgagttcaagtcctggatatccttgttaaccttctgtctcattgatctgtctaatatggacagtggggtgttgaagtctcccattattactgtgtgggagtctaggtctctttctaggtctctaaggacttgcttcatgaatccgagtgctcctgtattgggtgcatatatgtttaggacaattagctcttcttgttgaattgatccctttaccattatgtaatggccttctttgtctctttagatcttcactggtttaacgtctgctgtatcaaagactaggattgcaacccctgctttttttttctctccatttgcttggcagatcttcctccatccatttattttgagcctatgtgtgtcctgcacttgagatgggtctcctgaatatagcacactaatgggtcttgactccttatccaatttgccagtctgtgtcttttattwggggcatttagcccatttacgtttaacattaatatacttgtgtgtgaatttgatcccgtcattacaatgttagctggttattttgcccattaattgatgctgtttcttcatagcatcgatggtctttacaatttggcatgtttttgaagtggttggtacaggttgtccctttccatgtttagtgcttccttcaggagctcttgtaaggcaggcctcatggtgacaaaatctctcagcatttgcttgtctataaaggattttatttctccttcacttatgaagcttagtttggctggatatgaaattttggattgaaaattcttttctttaagaatgttgaatattggcccctactctcttctggcctgtagagtttctgctgagagatctgctgttagtctgatgggctcccctttgtgggtaacccaacctttctctctggctgcccttaccattttttcctttatttgaaccctggtgagtctgacaattatgtgtcttggggttgctcttctcgaggagtatctttgtggtggtctctgtatttccttaatttgaatgttggcctgccttgctaggttggggaaattctcctggataatatcctgaagagtgttttctagcttggttccactctccttgtcactttcaggtacaccagtcaattgtagatttggtcttttcacatagtcccatattttttggaggctttgttcatttctctcttttcgcccccgggttctgcccagggtggcctgatggaaagccccgacattagaatgggaaccatcccttaaaacctgtcttttccaaaagccagtttgaatttacatctttaaaatctccaaaatatttattttacaaggcaggagctgtgccccaaagcttgtggcaattggggacctaaggttccttgaaatcacctgagtgtggaagtggtgataaggtgctaaagagatgatctgaactcaccaggctgatgtggatagaatgggaggccccagttctgtccctccatccctgaggcccctccccaacctccctggaccccctgtccacagaggcmgtgctgtgtgccagcctcactcctgcattctggagatgccgttccaagatggaggttccctcacaccttcccccacccagcaaactccattggacagatccacaccagcaacagcttcacagctaggccctggaggtatggagctcacagacctcccactaactaagaaaaacacrgtagagagccagaagggtggcaggttccaacagagcccccaccatgtcccccacccagccccccatccgaccccttccctccacctggactcagcaccatcctgagtccctgtgtgagaggcacgttgagttctatggaagaataacaaaagtgagaacaactggtacagttgccatgaggccctggatgcccaggggactggaggctttgacggcctctgactcggcccctctcgggggatcctgaagactatggggatgtttgcctctccacacacacacagcatcccattccctggctgccactccacacggattaccttcctgcaccagaggtttcaatatttcttgaaaaggttggcaattttgaaatttttttcatacatttattccttatgatccactcctctgctttcttacaattgagcattttgagaataatttaaccttttcatcatgacttggggtcctgatgatgaacaccattattgtgttgagatgtcatttcccccagagtgcagggaccatgtctcagtcctctgtgtgctcctcggcacctcggccagcccatggcgatgctgtgtgtgtctgcggggttgcactgacagaagccaacagaggctctggcataaaggctgacagcctgctgctctgggcggttctgctttgtgaatatgtgttccttagtgtctttccttagtatcctctcttgctatcagtctatcagctcaccaaatcttgaggcccctctttttattttcactttttaaaaattgagatatcattcacctaacataaaaatcacccttttaaagtggttttcatatatattcacaaaattgtgcgtccatcactactatctaattctaaacattttcatcacctccacaaagaaacctcatacgcatggtcagtctccacacttctttcccctagcccccagcaaccacaaacctaccttctgtctctctggatttgcctgttctgcacttttgcatagaatggaatcctgtgccatgtggtccctttatgcacgatatccaacccagagaaaggccttgcttcctaagccctcctgagactcaccagccacgagcccgcatctatagcaagttcttttgaaggccctctttactgctggacattcttcctttgtgcaacaagtcaataaacccattttggttcagctacaggtgagttcttggtggttttttagcttaggaggattggcagaaatagaggttccctgagtcagctgaagccctcccccttggacaagaacccccgcctcagttagggtggacacagctgagacatacagggtgtctccctctgtctgaggtgccgggtggcccacagctggaaggcagctcgggctgaatggaggctgatatttccttgaggccccatggaggctgatatttccttgaggcccctccgcttcaggtgtgctctgttctgggaatgaggtgctgtgcgacttttcctggtgatctgatcagatttgccccgctccacggtgaaactgctgtctagccttctgagaaatgctcctatgtctatctggtggtcgaatgttctaagcgttgtctctaagtggaaaattcagtagttgataggggcccgggaagtctgtcctcaagctggtcttggaggtcacagtgctcaggagttcccctcagactagcattcattggaatgagctttgccccaggtcactgttttcatacctaagggtggattttcccctcaactttgtctctgtgtggttcctgagaactgctcactttaaagttccctctgcctggaatcaggaggattggggacaatcagcctgtggcctctgaccaagctctggaggcacgaagtctcttctcggactgctcgggtgcccgtgcgaccttcttcatcggaagtggctcttccccaggccaaacgcctgctgctttcagatttcctcactgtcgtgtgaactcatcttatgcctctgacacaatttcttgagacaccatttgaaactgcagtggccgctctggggaattttcacatgaatgaggttgttcgtttgagaggttctgtacagcaaacatggaaggagccccgtgaagagcttctcttgtgggamagagacatcgatgtgtttaatgcaggagacacagtcccttcctcatttgtttccatacttcagggactaataagtgctggggttttgttgtacagattgataaaactgtcgaaggccaaactgttgtccaaaacaggataatttcactagctttgagagtatttgtcaaaaatatgtttttctaacttttctttttttttgcaaaataacctaattagcctgatagtcataatttcatacttactggaagccagttccctctacttttttatttaaaacaagcttacatttcttattttaatatttatgtatgtatgtatgtatgtatktatktatktatttatttatttatttatttatttgagacaggatattattctgtcacccagactgcagtgtagtggcacaatcacagctcaccacagcctggacttcccaggctcaggtgatccttccacctctgccttttgagtagctagtactacaggtgcccaaccaccacacccagctaagttttgtattttttgtagagatgaggttttgctatgtttcccaggctggtctcaaattgcttgggctcaagcaatctgcccacctcagcctccaaacttagaattacagacgtgagccacaccatccagcctctaattttttgtttctatccctccatttttcttgggttagacgacattgactcatgatttttcagaaaagaaaacagaggctcagagaggttaagtgacttgcccaagttcacactgctaacctacagcagggccaggactcaactcagaccgtgagatgcggccagcgtttggaacaaaagcgtatctcattgtgttgcttccctcagcaccgaggagaaaggagagaaacttggggatcatcagaccagccacgccagagctcatagcagtcttactcagtcccacaagcccacaggacgtcagcacaagaacctgttcttaaaaccatccaatctcacctctcgattaacagatgtggagactcaggcccagagaggaaaagtgactcattcaaggtcgcatagattagtggcaatgcctagacttgaactgagatgagcagagtctggtgcactgccacgtcccaccctcctcctccacagcaggtgcagggagggtccattcttctggtcactgcagcatagtacagttttctgtgtcagtgcccttcctcttaggaagaaacacctctgggctggggtagctagctcccacttttagccatgtaaaatttctctctgggcattttaggtaggagtgttgtctatattcttaagtgtccgagtctactttggctacagagatgaattaggaaaaattagactctgctttgtatgtatgcagagttctccgtgcacgataaagtgtaaatgaaaagcagcaaatgctattagcaggagggcaagccaaaactgctaggccctttttaaatgtcctcaagtcatcctcaaacctacccatgtaattatcttctaagttcattctcaaaaatgagattctaaatttcagggtttatttacagccagatgatcataatactcccctgctcaaaaagcttcggtgacccctattccttgaaattaaagtcacagattcctatctcatcattcaaggccacctgtgatctggtcaaaatctatttctagtagtattgcccactgtttcctttccaggcactcaactcagtctacctccagctgattagatttcctagaaataactactcctccttctaaaccccatgaacaaatgttttctgaaaaggtatttggaggaaagagactttattccagtggacaaaactgggtgttaggttttgaagggaaggcgagggttaaagaaagacatacgtaagagggtggcttaatagcaaatgcaggctttatgtccagcataaaacctacagaagtcaggaaccagcataatgccagagcccactgctgcttacaggctggggcaatttatgggccaaaggggtctgggcagtatggcttgctgcctggcaggatattgataagatgttcccgtgatgagatggttctggcccttgttccagtgggatttcgttgtggtgttcctcggatctttgtccagcatgatatgatagagatgtgtctttggttaggcctttgtctgccttgtggtcaggtggttaggcaggacgtttctcacacccraacccctgtttcactttgactaaggtctgcaaaatagcagggagagcttatgacatggtgcagtttggactaacactgagagaccagagttcagtgtaaaatgaatgtgcgttcagagaacagagaggagtcgggctttayagcaaaatttgctgcccaggttccccatcaggttcatttgcatatgaacccagattcatttgcatttgctttcctctgatgcagctgagccctgattaaccgagcagatragctctgattgattggtttccaagccctaaactgggagtctctgtcagactgtggcwggctggtggtgggaggggcccagcagcagtttgtcctgggagcaacagcaggcgctggtttggcttgattgtgaaaagaggggtcctgtgatgctcttatatctttctgagaacacagagtatgtgatygctcccacacccggctgtagccactgggtttctgttttaaatatgagtacctcagtgagtcatagggagtccatttggtctgtgggctgtgaacatactttaaacaatcccaatcctgttctctcttgacaaatcactttctttacccaaatacagatactggagtacgtgtctttcctccccttaaggacagtacctcttgggcttactttagttagccccacctaggagagagcctggcacatgttaggtcttaataaacactgagcaaatgaatgactgagttgtatgagacatttcatttaccctccccggctccatgcctgggaggaatgagctacctctgaagatgggtaacgtcttgagattttcacaaaagaatataaagctagcaagtcaaagacagtgtgatactgctttaattttagttgtgttttttttttttcctgaaacacagcacattaggagttgagatgatggtattgactgtccttgtggtttgtgtgcaatttttaaccaggattcatggctggggaaacaaaagcacttctttgcttgcataacttttttcccttcctttattacttcaaagaggcaagatgtggtttgcattcatttcactgctaatattgctctcaaagatcgctaaagatctcttctccccttacacattccactcatttrtaacccagatcctcagtgtggctaatggagggtccctcagccctgtaacttctgtgcatgaagcagtaggtagtgggtccagttatgttaaacattaggtaatatcagtatcttttaaccttactatgagaatcttaaagatggaagcattagcctctgcttatgattgctgyaggcaagaatstgcaccaaccctcccaagmgtataaagatcatcaccgtcaccgtcaccattgtaaggtcacagctcttcacagttcacttatctttttcctagttattctccctcctaatcattgccaaagtcttgggagataggtgtgaatccttctaggaygcagctgaaaaagttaaatgtcttgtcctagagcacacagctcagcagcaccaagaatgaaatgttaaatctggtgtttttccctctctgctgtagtgaagctctgctagagatttaccgaagtccttgatattttaacctagctatcaacttcagcccagagaagntcttccaaaagtagattccaaaagtatattcatccatcaaccataaccttaaatctgaagccaggaactaaaaagaaattctcaaggtaacacaattgtcatgaagtctcactcccaggrccaattataatctggatttttgtcttcatccttccaggtgtctctgatcccactgtaagcaaaccctgagtcctagggcctttcttccrcttatttcactctttctgtacacattttccagtacctccaccactcaccaccctccaaaaagaactgatccctaagcttgtgcagtgattaaygattttcatgtcttttctatttgcctgcagttatgctacaagatctcttggcaaaggactagccaggcatgcctaatatatacattcgtgtgatttaacaaactggtttctaccactttcggcctsaagtgacagtgttttttaacgttggttgcaggcaggggactgttgccccctgccaagcacttcagcttccttgccyggcctctccttggcttctgtctgtccccaccagcagctcttcatkggacccatcctgaccctccaagaaagcagaaaaggaggttcctgatgcaaaacctaaagagctttcatctgaggaaggtgartcctttttaaactatgaggcctggagagacgttaaaatgagagcaatcacaccytactccccgctttgagctatgtattcatctcttaaaactgcttgctattgccacaagtagctatgaattaattttaatttaggattattatagtgtctcaccagaagcataaaccacatcctataacttaacaataaccaattgctcatcaattttgtttctgtaatccaaagagagttcctgatcaacaactttgtaccagcccactctctcsgtcccagtcttttgtttttaaaaacctgcttggaacaaaggctctaggaagctcacagccaagagtacttgggtctgagtcttccaggcagctgtcctcactttggctcaagtaaactctttaaattatgctttgcgtctcagcctctgccttttgggtcaacactgaggggagtaaatgaatggcacctgctccttctctgtctgaagcttggacttctcctgagaggacttcctgctccaagataggagggagtctcactcagaagaggaaggagctcctgtctgctgaggacacggttccatccaatgaggtcagcagggctatcagcagcttccgttaattccgttggggyaggcgtgtggcaagcrgcagttatttgagctgaggatgctgggatggattttcacatgagcagttggcccttagatcatgagaccagcctaagtgcccaaggaaatggaacagcagggagggggagggacatcacatccactatcaaaacttcttgttagtctctggcttccacatcctttcccaaaacttcagcccaattcacagccgcatttttccatctctttgccattcctccatgggagagctttctgttggtacaggaatagctgagaagtgggaaagatcawgggtagtaagagctgcccccgataatctacagaaagctttgctggaatgaggttgtgcatctctgaacctgagctagatttgttgggtcagggaccatacttatttactggcccaagaattagaagaggaggtgtctaagaaatgcttgttgaatgaataaataaacagccgagtgagtgtttatatgagcctgaaaactgcctgcaccagcacaaaagtaaagccccaacaccctcaggtcacacctactggaaaaatatatgtcagccccagaaaaatgtgggcaacatgaggcaactccggagcaacacaggaaactgccctcctcttctggcccctcttccactgtgatgctcaaagtctgtgatgaccaagtctggtcatctaatcagcaggatataagagggtcattcttcactgcggccattccagtttcctggaaacttggctttctcctgaccgtttccccakgagcacggtggtgacaagcttgagctctgacatcagaaagtccccagtttgaaacctctagcttcttactcgctagctatgagactttgggcaaattaatctctaaacctcaatttctcaatctgtaaaatgttcaaggtcaagcaactcacttttccacattgtaattgatgaaaytaaaattcagactcagatctgcctcactccacagtctgtgctttttccttcccactcatctttttctctttctattaaaaatttcataacacatttgagattctgtctcaactcatatcactgaaatcatctgtcacgtctgatgatcatatagaagccagactaagattcagccacaaatgttatgcctaaacatttcttattatttctttttaatgtttctcatgtatacaatcaaactcgcaccctagtattattggcaggctaatatatgcccatgagacatgtagcttaaatctctatgggataggataartattctccctttgtttgtgatttgaaagctttccatggatgctaaagcgatttgttaaaataccttcacctgtaagtgtttttcctctcttaaaagcctaattcatctctgagtttgtttactaaaataatctaatttgctcattttctctagccattccaagctaaatcccaggaagtactaaagaagcaatgcacagacacagtatcatacaatttgagacacagtattatacaattgatgtgaacttctaggcacagtgtgctcacagtctgtctggaaataactttgtagcaagcatagttccagtctagctgcctggcagcctggcaggatattattattactgatactaatttactttttaatgtaagtctacccagaatatattaaagaagtttcaagaaatcaggatcatggattataacctgacgtagtgctaaggaaccatcagttccatgtaagcatttggttagcaagtctttttcaaaggccatgcttgagaaacagttttgctctcccaaacaatgtgttgtagttttttttagcatactactgtgcagataaataaatgagatattaatgccattgcaagttctggctttgtgtagagttttctagtgaagcctgtttaggatcctggatttgtccaagctgttctgattatcccatcatttttaacatggataatctacaatctttcatctattacataaattgaattctggcacaagttcaactgctcttcattgaaactgagaaaaattttaggatcactttgctggaatccaaagaagatgttaaatactaccaaaaaaaaaaggctgaaaactggtttccaagaatctctggggcatccttaagaactccccttgcatgttcattagayggccctttacccaatgtatctctaatagtctgctgaaaatactcaaaggcaagtaattttcatgtaatcaactaaacaaaatgtttaacaaatatggcaaatattaatatttttaactgtttatgtaaagtgcaagagagttattgattaggagagtagctctgaagccgaacagcctaggtctaaatcccggttctttcatcaayaagctccattactgttgataagttatttgaattatcggtgtcttagtatctttccttatagaggtgatgattgctcctacctaatagcactgtagcaatcatatatgcagagcttatcacactaattgacattcaaaaatattagctcttaaaaaattattattagaaatttgagaaaaagaatcacactaaaaaaggataaaaggcattgaaaataattcccccaaaagaaaataaaaatttctcaaatcatataggacttattttgtaacattaagaagattccaattaattcaaattaaatggatgatgccttatcttcacaatgacattccaatagcttgttttcttaytttaatgaaaatatgtaatgatggtgaagattcagtgagacaggcacttccatactagctgctggaattctacgttgacacaacatatttggtgagcaatatggcaatcagaagactaaaagaatgttgcatattttgtcttggtaattcctcttctggaaatctttcttaagtgaacaattcctaattcaaaagctacttactatatagttatacacaaagacatatrctacaaaattattaattactaggaaaacaaaatgaaataatctatatgttatataataaaagcataactaaataaatttcgtgtagtcacataaagatatgtttatgcagcagaaaattggaatttatgaaaagattggcataatatagagacaagttttcttagttatcatgaacagaaaagtatgatggcagtcatgaaaaatattcattaaaaattagaggaaaataaatatgtctatctatctagctagctagctaattttgagattctgttttataactgaagtttagactctgtgaccctcccctaaaagtctgttcatctcttttttagttaagactgttgactgttttccacaacaaccagtagacatcagtgaccattaaccacttttctcatgcattctattttccttatttccagaatacattcccttaagctaaatacaacttctccctctacatctgttttccatgagcatatctggatttactggtatatctatcacttccatgtccttttcaggattggtgaaccatgtcatccattcctgctccaggcagaagcttgttctcagtccttggttttgagcttgtgtatctgtctctctctttaatttttattttaggttcaggggcacaagtgcatgtaggttagatgggtaaactcatgtcacatgggtttgttgtacatattattttgtcttccaggcactaaacctactacccaatagttattcttcctggtcctctctatccttcgaccttctactctcaagtgggcctcaatgtctgttattccccttattgtctccgtgtgttctcattatttagctcccacttataaatgtgaacattcggtatttggctttcttttcctttgtaagtttgctaaggataatggcctccagctctatccatgtccctgcaaaggacatgatctagttcttttatgtgactgcagagtagtccatggtgcacatgtaccacatttttttttaaatccagtctgccgtggatggacatttaggttgattccatgtctttgctattgtgaatggtgctgcaatgaacatgtgtgtatgtatttctttatggtagaacaataaatcacaatgttaatggctgttggtagaattaattttacgtaatttctaatctttttctttatatttttcaaatattctacaatgagaatacattgcttctctaataatattaatgcaagcatataaataatttaagttccctggttaatctcacttattatctctaagctttgtgtctccttgtgaaggcaaatctcctgaataaatgcttacttagcacgcgcatccacttggaatccatcatctgaaatagttactgttcrtggtgcattgactttaacttcaaacttgggcaacactggaaacaaagagaaatatacttcagcccccacaatcactggtgagcaaaatttattgcaatcatgtagcttaaggtgcttcccagcaccagctttccctgtatgtccatctggatagatcatgttctgttgccccagattccatgtggcaccagtctacatgatggtgtctcactagtcattaactcttcctttttcttttctctgtcctcagaatttcaagttttttcctttgtaatctcttagatctctcctggcagattgggctctagaaaatgtatatttcctaggggaaaaaaaacgacagaaattagaataacgatactgggggaggagtgaggaggaggaaaatgctgatgatgaagctgaccaggccaaggaagggagatgagaaaaaccagatcaagcttcacctactcctgcctacgtctaacaccaaaggtgttttgttccatgctttgaatcctttatctacacaggacaactacaaatagcaattggttaccctacccttgatagtaaattggtgtgtcagtgtctttcctgattttcttttcacgacaattgagtaacctccaaacactgtttctgaaatcartgggaatgagaggaatcatacagtatggactgttttgtgactggcttccttgtttccacattatgtctgtgaaattcatccctcttgtggcagacaggaggagctcactgcctttcactgtcttgtaatcttccatggccggagcaccccacactgtatccattctattccttccactttttgatgatgatgaatgaagcttctctgaatgtgtttgtatatgacttttggtgaacataaatgctcatttcagtttggtagatacctaagaaattgaattgctaggtcatggttttttcttacatgtagctttagcagatacagaaagtttcttatagttgtggttcaagttacacgcccaccaagtgcagacaaaagcactagtagctccacactcttgccaacacgtggtattgttagttcttttcattctagtgcatctggggaatgcagtgctatataacctgcattttctttcctttttttctttctttcttttttttttttttgttgttgttgttgttgagacgtggttttactctgttgctaaggctggagtacaatggtgtgatcatagctcgctgcagcctccacctcatgggctcaaggaattgtccctccttagcttctggagtagctgggaccacaggcatgcacaccatggtcagcttaatttgtattttcttgatagttaatgaagttgaacaggttttcatatacttattggctgtgtgaatggcctcttttgtgaaatacttatttgacccatttataaagatttttattgtcatttgttattaatctgtggggtttctttttctttttcttttttttttttttttgagacggaatctcactctgtagcccaggctggagtgcagtggctcaatcttggctcgctgyaagctccgcctccygggttcgcgccattctcctgcctaagcctcccgagtagctgggactacaggcacccgccaccacgcctggctaattttttgtatttttagtagacggggtttcaccatgttagccaggatggtgtcgatctcctgacctcctgatctgcccacctcggcctcccaaagtgctgggattacaggcgtgagcacaagaaattcccacaagaaatctgtgggatttcttgatatattctagataagatttgctttgaaagacatatattgtaataatcttctgctctgtggcatgtcttttcactcacataagggtattttttgatgaaccatatattttttattttaataaagttcaattaatctacttttactatattttatttttaacaaccttgtcaatatattatttattatttttgtttawcttatttttatagttagtggttttttatgtgtgtcttgtataaaaaatatttgcctatccctttgttataaagataaacttatttaaaaaaaaaaaatctagaccttttttttcttcaatacaccatgcttaacacagattgactttttttacccttcatgttttggtctaggatccatctcagatttatttacatcaggactgaggtggagagtcacggtttctatttttctatatggatgtgtggctaacccagggccatttattgaaagaccaccctctccccacttaactgtgctgtctcccgtgtcatctatcaggtgttaccgcatttttcacttcygtgcactcttgtttgcgccattggtcctagaatatatttttgtgccagcacttcagcatcttagttattgtagctttaaaagaagtgttgctgtctggcagttcagtcctccagctttgttctgtttaagggctgcattggctgttcttgattctttgattttccatatatactgcagaatcatcttcaatgtataccaaaaaaaaaaaatgctgggattttgattggcattccactgaatctgtacatcaaattagagagatttggcatctggaaatattgagtcttccaatacatgaacatgatataatcctccattaattaggtatttctttaatttttttcttagcaatgttttgtgtttcatatttttcagtgtaaaggtcttgcctgccttagttttatgcctaggtattttttggttttggtaaatgctcctttcaaaagtgtattttccaattgtttactgccagtatatggaatgcaattgatttaggggggttatttattttaattgtgatatgatatatataatataaaattgaccatttaaaccatttttaattgtagagtacagtggcattaagaatactcacgttgttgtgcaacagttcaattgatttttaatatcagctttgttgagctatggtcgacatatgttaaaatttgctagctttaggtgtgcagctcagtgagttctgataaatgcatgcagccacgtggtcatcacagtgaagacatggaccatttccagcatccttcagagttcccgtgtgccctttarggctcctccccagcagcctscctcctggccttcagtatccayagacctgctttctcgcattgtcattttgccttttctagaatttcaggtaaaagaatcctacagtaggtatcttttgtgtctggctgctttcacttagtgtaaagctcttgagaggtatcygtgttagatgtgtatcggtaagttgccctgttttattactgaatatattccgctctatggatgtaccacagtttgtttatccatttatcagctgaaggccacttgggctgctctcggtttgtggggagcagagggaagctgctggaacattcttgtacagattgttgtgtggaaatctgcttttatttgtcctggataaacacttaggggaaggatcgctgggtcttatgtttgactttataaggaactgctgaactgttttccacagcagctgtgccatcttrtatgtccgtcagcaccgtgtgagagttcccctgctctgcaggcttgccaacgcagatgtgtcttttgatttcacctgttctagtgtggatacaagttgcatttccctaatgaataatgatgytctgaatcttttcaggcactttttttttttttttttttttttgccattttgtatacttctctggtgaagtgcctggtcaagccttttacccatttaaaaaatcaaactgttttcttattgatttataagatakaagctaggcatagttgcatctgcctgtagtcttaactacttggaagcccaaagcaggatgatcacttgagcccacgtgtctgaggtcagcctgggcgacatggtgagaccctgycactaaaaataaacagaaagtaaagatacatatatatctcactgtgctaggctgaatgatggcctcccaaagatgttyrcaacctaatctgtaaaaactgtgagtttcttaccttacctggcaaaagggactttgcagatgtgattcaactaaggatgttgagatggggagattctcctgggttacctggctgggtctgatgtaatcacaggagtcctcattagagggaagcagaaagaccaaagtcagagacggagatgtggccgtagaagcagaggtccatgtgctgcggggccatgagccaaggaacccacgccgcctctgggaactgggaaaggcaagggagcaacgtctccctggagctccagagtgagccagccctgatgacaccgtgacttcagccctcggagactgactgtggacatcggacctctgtcactgtaagatcctaagtttatgttcttttttgggaatatgcactctctcttcagtggaggacttgaagctggctcttctgattctaagtccatgttgattttttcctaccattgttcggggtagaagggagcaggtatctcaggtggtgggaacagtgcgagaaagcccccaggtcaacatgmacgctgccgcgcagggagcaggctcctctcagattaagcagcgtgtgctgggactgcgggaggtgaggtccattgggtggatccactaagctttggaagcagagagtttgggctggagatggtgagaaaccacatagtggttggagcattttrgggtytgtcagaagggtcagggctgctggctggggtaggagcaggtgctggggagacagcactggcctgcccacctcactgggctctgacaggaggcatgccaggcgtgctgttcattattatttcagaacagtgctgcttaactccasggaccaagctgcttctgtgaatgaggggtagggaatcccagaggccaaggccgcctcatctctcagggaccttctggctcattagatggcctcgtccctcaatcttctccaaactggtgctggcttccctgaggatgctctgagctggtgccattaacctgggcagcacttctctccrgtccacacgcacttcactctattatcctgcaccctgaaaaggcatggattttgttgaacggggccttgtgcatcagaagccaagtgcacctctgtctgggagctggaatgtatgcagtggtcatctttgctgcttctgccctggtgccacactctgaagagtgagaacatgggcagggtggtcgatggcttcacacctctgtctccccaccaggatctctggctgagactcagggtccgaggacccagggtgcctccagaccacagaccaatgaattttctgttctcttttcaacttcttcccagcctagggcagttcaaagccagcttctttcaggaagcctgccctgatagtgccacccaactacaaacacttattttctgtgctgcatattttcagtgctaagtgattgtgcattcaacctttcagtacacatggtctcctgtggttctctagtccttctggagaagcaagtgtgagacggatgcctcgtctggtgaggttacagactttctgaggatggggagcaatctttcttcatttgtatcatgtctcaccaaatagataaaccattggaggacaggtactgtttgacatgaaaataaggtttatggtgccctcctgatcattgttcagtaaactcttcagggaaaggagtggagagatcattagttcattggaaaaggtatttcttgcctagaggggtggattcctaaatttagggctaaatgtgtcatgcagctctaaatttctacaccatgagaaggtagtcccttttgcttcttttatgtacaatccatgcatttgttccacagacatctgatgtttactgaatgccctgtgcaacagagattgaggattcaaaggtgaacaacagatkatctttctctgcagggggctgtctctatgcacatcactcacaaatatccatctacggtccctcacaaatatccatctacagtcccaagctccttcccctaatccacgtcctgtgttaggtgttgggcaaactttccaggtgtcaagatgcagacaattagacctgcagcccccagaggagctgagataatgctactcctttcgaggaggggcacatgacatcacctgacctgttgaagcagtggacagagtggggtttgggggatcctaaccagagtagctagccctccccacctgcgtgtcttgtatctgtaggctctgcatccatagattcaaccatgttgggtaaaactattcaaaaaacattgcatatgtgctgaacatgtacaagcttttctttttatcataattccctaaacaactattgacatagtatttacattgaattaggtatcacaagtaatctagagcttattgaaagtgcatgcagggtgtgcataggttgtctgcaaatgccgcaccattttatatcaggggcttgagcacctgcgctgttggtatctttaagggaggatcctgaaaccaatccccaataattactaaggaacgacggtatttgggttttgacagaaagctgagaagcccagaatgttagaaataacctcctaacagtaggaagctgagttaaaatcaggaaaagccagcggttaaattcagtctttttacacacaagagcaagccacatgttctacagcaatggaggaaaaactcagtgattacccaatgaagtgaataaaagctgcagtgatagttacaacaacacgacaacaggtgacattgagaaggaagatctcatttagggtttgttggagggagccacagccactaaggatgcagcctcctttggaagcactgacctggcccctgcgcccatggacgtgggaatagtgtgggagctggcagagtctcagcaacctctcaatctagtttgtctccttagacaacatccatctcccccattctccatcagctccttttccagcttccccttcctgcccttgtttttgtaaggccgggagggaggtgtctgggcttacgacaatgtctcacattgccccaggagagggcagcagacattctcccatcccaggtgcctcctctgcactgtccaggattccagtgaattttcgagggttattgaaaattacctggttcatgggagccaggctctgtgctaggcactgggaatgcaaagccaactgagatatggggctctgctctgcaggagctggtggtctaaaagggtgaggcagccgtggaaacagatacagggccaaacagtgaggtcaaacgctggggcagaaggctcttcaggggactgtgggatccccggaaagtggggagaggaggggtctcagaaaacacccagcaggaagaggtgcttgagctgagtcttggaagccggcaggttttcctggttcctaggccaggcagggcacaccaggcagggcaccccaggcaggggagctgggctgagtgtgacaccacagggcgagctggggcttgaacacagggtgctgagggcaggaggggtctcagggaggggacgatcatggagggctgtcctgcatgcccatgctaaggagtctggaccagggcctggaaggatccgataagcccccraagggtttcattaggagaacaaccagagcagacctgcactttaaaatgacagctccctgttctgcctgtggaggacagacgtggcaggatggagaagggcaggcctgarggccgctggcccrgtcagctgggcttgaactaggtggagggagcgagggcagttgtctgaactaaggcaggagcagtgggaagggcagtgaggtgaacatgaggttgaaatgacaggttctggtctttggctagatggggccggatgagggcagaagtctcccaggtttctggcttcagtggctggtgtaagtgttggtggagctgaacacaagggtggaggagcgatctcgggagaaagattatgagtcattgacaaatatggggcgtctccccagaccccactatttcatttcccactgcaccctcttatctagatccttggtatttttcactggttttgagacagtgccttcctgttgggtcttgtaaggtccagtctctyttcttgttggaagagcctgtgwattctttcactgcatgtttatgaatagccttcccgggccaggcactgtgatgagttccttctcccatacagctcatggcctggtacagggggagaaggtgaaggaagagatagatggtgaggctgatggttgtagtccaatatgcagtgtggtctcataagtgaagaacaggctgcaaggagaacattccaggacaggcctgcgatctggacttcagtgttgaggtggtttcctaaagaaattgtctgggctcagctggatgtgcaagggctcctgagtgacaggctgtggagaggggcttctctggggctggaaggagccagtgcagtgcccgaccctgtggcatagaacgtgagaagtgggcagcctctgcttgagaggatgccgagggtggtcagcamggataactaacggtggcagggcctgacggggtcagcttgcaccaagttgggtggagaacgagtagctccaggcctcccacagtggacagatcctcaggcctggaggggtgtcctyctgaaggagcattcccagtctctgacgaatgaggcctgggtctctggctggagttggagtgggtctgtgtctggagggggcacttgggctctggaaagaggctacaaactctagactaggctgggcaaactatggccagctcctgttttatcagaatgcacctttatattctccttcatgtatgtattgtccatggttgctttagtgagttgagtggttgcaacagagatcacatggcctgcaaagcttcaaacatttcctaactggctttttatggaaaaggtttcccaagccctgctctaaactggcaggcaactttctcagagatagttcaggcctagtctccatgtgtggacaagatgagcccataccgtgaagctggatctcccaaaacgcacatctgtctcaggtcttataaagctgtgaatcattaagtgtgtgaacatacatgtggtcatgtgtgaatatgcatgtggtcacctgagcacacatatggtcgtatattaacatgcatgtggtcacatgtgaatgtgcatatggtggcatgtaagatgcacatggtcatgtgaacatgcatatggctgtgtgaatatacatatggtcctgtgaacatacatatagttgtgtgtgaacatgcacgtggttatgtgtgaacatgcatatggttgtgggaacatagatatggtcatgtgagaacatgcatgtggtttgtttgacgcatgtggtcatgtgatgtgagcttgaggtgcaccgtcaggctgggatgggccttcccagggtggactcagccccttgctgcaagagaccacttcctgaatcctggtcctaagcctgtgagcctttgctcggcaccaagaagcaactctgttgataccgactgagattcagatgcctgaacctgaccttctacacacgtggccctagtggatcattccagcctcagtttccaygtctccccaaatgcctgctaaatgtgtcagccaaacctgactacttcccattctgcacacataccttctccaccttggtggccgaatcctttggagcccacctctcacattcagctcccggttcttggttatttgggctcctgtctcgtgtgctctatcaggttctaggctttgcaggagtgagttctgtctccactcgtttctatgtgcctcgtaggactggctcttgggagggtcttcatggtgactgaggccatggatccttagccctgtagcttgaattcacttggcactcaaacactcatcctgaaatgatgctctgaaagtgatgcttccagtcagttaaggatccactgtattatggatctccagcacccaatgcctggcacataagaaatgaatgaaaagtagtgaatgatctcaagtatgtctacaaggcgagaggaaagtgatcctattcaccagacatgctagggaggcatttggygctgttggctctgctgttgcacaataggcctgggactctgaaggctggcacttcctcatcctaaacctcaaattttaatgaattacctccaagtgggcaaaggtccatgggccagggttcttggtgtaaataacccacctcttttgggtgtggttaatggacagggactatacaaaactaaaaacaatgtttgaatgctgacttcctgtcagccatggtgatgaagcactctgtatacatgaccttattcaatgctcactacaaacccatgaagcagatttttagaaaaactttctatttggagcattttaaacaagaggatagtgtaatgagctttcacctccttatcagcagatttaaatatttgttaactcatggcccatcttgtttcctgtatactcccacccacttatccccctctcttgttgttttaaagcaaatcccggacattatgtaatttcatctgtgaatatcttagtatgtatctgtaaaagaaagggactaattttttgttgtttttgaaacagggtctctgttgcccaggctggagtgctgtggtgtgatcatggttcactacagcctcaacctcctgggctcaagaaatcctcccaccttagcctcctgaatagttgggattgcagatgcacatcaccaggcccagataatttttttatttctatttttgtagagatagggcctttctatgttgcctgggctagtctagaactcttgatctcaagtgatcttcctgccctggcctcccaatgtgctgggattataggcatgagacaccatacccartgataagaacttattatttatttatttatttttgagacagagtcttgctctgtcatscatgctggaatgcagtggcggaatctcagttcactgcaacgtccgcctcctgggttcaagtgattctcctgcttcagctgcacgagtagctgggattacaggtrtgtgccaccacatctggctaatttttttgtattttttttttttttagtagaaatggggttttgccatgttggctaggctggtcatgaactcctggcctcaaatgagcctcccgccttagcatcccaaagtgctgggattacaggcatgagccaccgtgcccagccaagaactcttttaaaaaaaaaacaaaattgcaataccattatcataccaaccatcgcacactactattctttaatactaccaactaccctactgtctccaaatttccagtaatttcatttttttgttagtttgtttgaatcaaaatccaaataaagtctctccttatgattgtttgatttgcctgttagtatttctggatctataggtttctcctttcatcaattgtttctcctttgcaatttatttattgaagaaacaagactgtttccctgtatttcagatcttgctaaatgtatcctcattatggcgtttctcatagtttggattttgctaattgtatccttgtggtgtttaacttggtcttcactttgttctctctatttactataaattagtggtacgatctaaaaacttggtcagaggcaggttggatttgtggggcagggtaaaaatactttgctaggttcttccatcaggaggtgtgtactggccggcatatatatatatatatatatatatatatatatannnnnnnnnnnnnnnnnnnnnnnnnnnnnnnnnnnnnnnnnnnnnnnnnnnnnnnnnnnnnnnnnnnnnnnnnnnnnnnnnnnnnnnnnnnnnnnnnnnnnnnnnnnnnnnnnnnnnnnnnnnnnnnnnnnnnnnnnnnnnnnnnnnnnnnnnnnnnnnnnnnnnnnnnnnnnnnnnnnnnnnnnnnnnnnnnnnnnnnnnnnnnnnnnnnnnnnnnnnnnnnnnnnnnnnnnnnnnnnnnnnnnnnnnnnnnnnnnnnnnnnnnnnnnnnnnnnnnnnnnnnnnnnnnnnnnnnnnnnnnnnnnnnnnnnnnnnnnnnnnnnnnnnnnnnnnnnnnnnnnnnnnnnnnnnnnnnnnnnnnnnnnnnnnnnnnnnnnnnnnnnnnnnnnnnnnnnnnnnnnnnnnnnnnnnnnnnnnnnnnnnnnnnnnnnnnnnnnnnnnnnnnnnnnnnnnnnnnnnnnnnnnnnnnnnnnnnnnnnnnnnnnnnnnnnnnnnnnnnnnnnnnnnnnnnnnnnnnnnnnnnnnnnnnnnnnnnnnnnnnnnnnnnnnnnnnnnnnnnnnnnnnnnnnnnnnnnnnnnnnnnnnnnnnnnnnnnnnnnnnnnnnnnnnnnnnnnnnnnnnnnnnnnnnnnnnnnnnnnnnnnnnnnnnnnnnnnnnnnnnnnnnnnnnnnnnnnnnnnnnnnnnnnnnnnnnnnnnnnnnnnnnnnnnnnnnnnnnnnnnnnnnnnnnnnnnnnnnnnnnnnnnnnnnnnnnnnnnnnnnnnnnnnnnnnnnnnnnnnnnnnnnnnnnnnnnnnnnnnnnnnnnnnnnnnnnnnnnnnnnnnnnnnnnnnnnnnnnnnnnnnnnnnnnnnnnnnnnnnnnnnnnnnnnnnnnnnnnnnnnnnnnnnnnnnnnnnnnnnnnnnnnnnnnnnnnnnnnnnnnnnnnnnnnnnnnnnnnnnnnnnnnnnnnnnnnnnnnnnnnnnnnnnnnnnnnnnnnnnnnnnnnnnnnnnnnnnnnnnnnnnnnnnnnnnnnnnnnnnnnnnnnnnnnnnnnnnnnnnnnnnnnnnnnnnnnnnnnnnnnnnnnnnnnnnnnnnnnnnnnnnnnnnnnnnnnnnnnnnnnnnnnnnnnnnnnnnnnnnnnnnnnnnnnnnnnnnnnnnnnnnnnnnnnnnnnnnnnnnnnnnnnnnnnnnnnnnnnnnnnnnnnnnnnnnnnnnnnnnnnnnnnnnnnnnnnnnnnnnnnnnnnnnnnnnnnnnnnnnnnnnnnnnnnnnnnnnnnnnnnnnnnnnnnnnnnnnnnnnnnnnnnnnnnnnnnnnnnnnnnnnnnnnnnnnnnnnnnnnnnnnnnnnnnnnnnnnnnnnnnnnnnnnnnnnnnnnnnnnnnnnnnnnnnnnnnnnnnnnnnnnnnnnnnnnnnnnnnnnnnnnnnnnnnnnnnnnnnnnnnnnnnnnnnnnnnnnnnnnnnnnnnnnnnnnnnnnnnnnnnnnnnnnnnnnnnnnnnnnnnnnnnnnnnnnnnnnnnnnnnnnnnnnnnnnnnnnnnnnnnnnnnnnnnnnnnnnnnnnnnnnnnnnnnnnnnnnnnnnnnnnnnnnnnnnnnnnnnnnnnnnnnnnnnnnnnnnnnnnnnnnnnnnnnnnnnnnnnnnnnnnnnnnnnnnnnnnnnnnnnnnnnnnnnnnnnnnnnnnnnnnnnnnnnnnnnnnnnnnnnnnnnnnnnnnnnnnnnnnnnnnnnnnnnnnnnnnnnnnnnnnnnnnnnnnnnnnnnnnnnnnnnnnnnnnnnnnnnnnnnnnnnnnnnnnnnnnnnnnnnnnnnnnnnnnnnnnnnnnnnnnnnnnnnnnnnnnnnnnnnnnnnnnnnnnnnnnnnnnnnnnnnnnnnnnnnnnnnnnnnnnnnnnnnnnnnnnnnnnnnnnnnnnnnnnnnnnnnnnnnnnnnnnnnnnnnnnnnnnnnnnnnnnnnnnnnnnnnnnnnnnnnnnnnnnnnnnnnnnnnnnnnnnnnnnnnnnnnnnnnnnnnnnnnnnnnnnnnnnnnnnnnnnnnnnnnnnnnnnnnnnnnnnnnnnnnnnnnnnnnnnnnnnnnnnnnnnnnnnnnnnnnnnnnnnnnnnnnnnnnnnnnnnnnnnnnnnnnnnnnnnnnnnnnnnnnnnnnnnnnnnnnnnnnnnnnnnnnnnnnnnnnnnnnnnnnnnnnnnnnnnnnnnnnnnnnnnnnnnnnnnnnnnnnnnnnnnnnnnnnnnnnnnnnnnnnnnnnnnnnnnnnnnnnnnnnnnnnnnnnnnnnnnnnnnnnnnnnnnnnnnnnnnnnnnnnnnnnnnnnnnnnnnnnnnnnnnnnnnnnnnnnnnnnnnnnnnnnnnnnnnnnnnnnnnnnnnnnnnnnnnnnnnnnnnnnnnnnnnnnnnnnnnnnnnnnnnnnnnnnnnnnnnnnnnnnnnnnnnnnnnnnnnnnnnnnnnnnnnnnnnnnnnnnnnnnnnnnnnnnnnnnnnnnnnnnnnnnnnnnnnnnnnnnnnnnnnnnnnnnnnnnnnnnnnnnnnnnnnnnnnnnnnnnnnnnnnnnnnnnnnnnnnnnnnnnnnnnnnnnnnnnnnnnnnnnnnnnnnnnnnnnnnnnnnnnnnnnnnnnnnnnnnnnnnnnnnnnnnnnnnnnnnnnnnnnnnnnnnnnnnnnnnnnnnnnnnnnnnnnnnnnnnnnnnnnnnnnnnnnnnnnnnnnnnnnnnnnnnnnnnnnnnnnnnnnnnnnnnnnnnnnnnnnnnnnnnnnnnnnnnnnnnnnnnnnnnnnnnnnnnnnnnnnnnnnnnnnnnnnnnnnnnnnnnnnnnnnnnnnnnnnnnnnnnnnnnnnnnnnnnnnnnnnnnnnnnnnnnnnnnnnnnnnnnnnnnnnnnnnnnnnnnnnnnnnnnnnnnnnnnnnnnnnnnnnnnnnnnnnnnnnnnnnnnnnnnnnnnnnnnnnnnnnnnnnnnnnnnnnnnnnnnnnnnnnnnnnnnnnnnnnnnnnnnnnnnnnnnnnnnnnnnnnnnnnnnnnnnnnnnnnnnnnnnnnnnnnnnnnnnnnnnnnnnnnnnnnnnnnnnnnnnnnnnnnnnnnnnnnnnnnnnnnnnnnnnnnnnnnnnnnnnnnnnnnnnnnnnnnnnnnnnnnnnnnnnnnnnnnnnnnnnnnnnnnnnnnnnnnnnnnnnnnnnnnnnnnnnnnnnnnnnnnnnnnnnnnnnnnnnnnnnnnnnnnnnnnnnnnnnnnnnnnnnnnnnnnnnnnnnnnnnnnnnnnnnnnnnnnnnnnnnnnnnnnnnnnnnnnnnnnnnnnnnnnnnnnnnnnnnnnnnnnnnnnnnnnnnnnnnnnnnnnnnnnnnnnnnnnnnnnnnnnnnnnnnnnnnnnnnnnnnnnnnnnnnnnnnnnnnnnnnnnnnnnnnnnnnnnnnnnnnnnnnnnnnnnnnnnnnnnnnnnnnnnnnnnnnnnnnnnnnnnnnnnnnnnnnnnnnnnnnnnnnnnnnnnnnnnnnnnnnnnnnnnnnnnnnnnnnnnnnnnnnnnnnnnnnnnnnnnnnnnnnnnnnnnnnnnnnnnnnnnnnnnnnnnnnnnnnnnnnnnnnnnnnnnnnnnnnnnnnnnnnnnnnnnnnnnnnnnnnnnnnnnnnnnnnnnnnnnnnnnnnnnnnnnnnnnnnnnnnnnnnnnnnnnnnnnnnnnnnnnnnnnnnnnnnnnnnnnnnnnnnnnnnnnnnnnnnnnnnnnnnnnnnnnnnnnnnnnnnnnnnnnnnnnnnnnnnnnnnnnnnnnnnnnnnnnnnnnnnnnnnnnnnnnnnnnnnnnnnnnnnnnnnnnnnnnnnnnnnnnnnnnnnnnnnnnnnnnnnnnnnnnnnnnnnnnnnnnnnnnnnnnnnnnnnnnnnnnnnnnnnnnnnnnnnnnnnnnnnnnnnnnnnnnnnnnnnnnnnnnnnnnnnnnnnnnnnnnnnnnnnnnnnnnnnnnnnnnnnnnnnnnnnnnnnnnnnnnnnnnnnnnnnnnnnnnnnnnnnnnnnnnnnnnnnnnnnnnnnnnnnnnnnnnnnnnnnnnnnnnnnnnnnnnnnnnnnnnnnnnnnnnnnnnnnnnnnnnnnnnnnnnnnnnnnnnnnnnnnnnnnnnnnnnnnnnnnnnnnnnnnnnnnnnnnnnnnnnnnnnnnnnnnnnnnnnnnnnnnnnnnnnnnnnnnnnnnnnnnnnnnnnnnnnnnnnnnnnnnnnnnnnnnnnnnnnnnnnnnnnnnnnnnnnnnnnnnnnnnnnnnnnnnnnnnnnnnnnnnnnnnnnnnnnnnnnnnnnnnnnnnnnnnnnnnnnnnnnnnnnnnnnnnnnnnnnnnnnnnnnnnnnnnnnnnnnnnnnnnnnnnnnnnnnnnnnnnnnnnnnnnnnnnnnnnnnnnnnnnnnnnnnnnnnnnnnnnnnnnnnnnnnnnnnnnnnnnnnnnnnnnnnnnnnnnnnnnnnnnnnnnnnnnnnnnnnnnnnnnnnnnnnnnnnnnnnnnnnnnnnnnnnnnnnnnnnnnnnnnnnnnnnnnnnnnnnnnnnnnnnnnnnnnnnnnnnnnnnnnnnnnnnnnnnnnnnnnnnnnnnnnnnnnnnnnnnnnnnnnnnnnnnnnnnnnnnnnnnnnnnnnnnnnnnnnnnnnnnnnnnnnnnnnnnnnnnnnnnnnnnnnnnnnnnnnnnnnnnnnnnnnnnnnnnnnnnnnnnnnnnnnnnnnnnnnnnnnnnnnnnnnnnnnnnnnnnnnnnnnnnnnnnnnnnnnnnnnnnnnnnnnnnnnnnnnnnnnnnnnnnnnnnnnnnnnnnnnnnnnnnnnnnnnnnnnnnnnnnnnnnnnnnnnnnnnnnnnnnnnnnnnnnnnnnnnnnnnnnnnnnnnnnnnnnnnnnnnnnnnnnnnnnnnnnnnnnnnnnnnnnnnnnnnnnnnnnnnnnnnnnnnnnnnnnnnnnnnnnnnnnnnnnnnnnnnnnnnnnnnnnnnnnnnnnnnnnnnnnnnnnnnnnnnnnnnnnnnnnnnnnnnnnnnnnnnnnnnnnnnnnnnnnnnnnnnnnnnnnnnnnnnnnnnnnnnnnnnnnnnnnnnnnnnnnnnnnnnnnnnnnnnnnnnnnnnnnnnnnnnnnnnnnnnnnnnnnnnnnnnnnnnnnnnnnnnnnnnnnnnnnnnnnnnnnnnnnnnnnnnnnnnnnnnnnnnnnnnnnnnnnnnnnnnnnnnnnnnnnnnnnnnnnnnnnnnnnnnnnnnnnnnnnnnnnnnnnnnnnnnnnnnnnnnnnnnnnnnnnnnnnnnnnnnnnnnnnnnnnnnnnnnnnnnnnnnnnnnnnnnnnnnnnnnnnnnnnnnnnnnnnnnnnnnnnnnnnnnnnnnnnnnnnnnnnnnnnnnnnnnnnnnnnnnnnnnnnnnnnnnnnnnnnnnnnnnnnnnnnnnnnnnnnnnnnnnnnnnnnnnnnnnnnnnnnnnnnnnnnnnnnnnnnnnnnnnnnnnnnnnnnnnnnnnnnnnnnnnnnnnnnnnnnnnnnnnnnnnnnnnnnnnnnnnnnnnnnnnnnnnnnnnnnnnnnnnnnnnnnnnnnnnnnnnnnnnnnnnnnnnnnnnnnnnnnnnnnnnnnnnnnnnnnnnnnnnnnnnnnnnnncttacaggcacaagccaccactcctggccctgtgtctttttttgaaaagttctttctcctcccatgccattccctctattcctttacatcctgaaaagccctactcagtaggccctcttctttgaacctcctcctagctggtgcataattatgccctcctctgtattatttcagaacattgtgtatgcctataatatcacatatgttatcctatgttataagtatttgtcatgtttttctctagatttatactagacttatcttaaatactctcataattgccagcatatagaaaatgcctaaagaatatttgttgaatccacctgaattaggatttgtctataagcctctttgcttttaataaacaattttctaatttgtcagacagtttaaatgcattttgaagagaacatacttaaaaaaataacattttaaatgtgacaatgtaacatatgcttattttagactatacagaacatattgaaaagcccttcgaagaacagaaaaatgatttttaaatgtacaatctgggtactgttagtccaaactgcactgttttgtaagccccctgccgtttcacagaccttggcagagcaaaacattccatgggggttccaccgtgagaaatgtcctgccccaccacctgaccacaaggcacaggaatgtccttatcataccctgccgagcaaaggcccaactgaaggaacatctttgtcaagcagcaaaccacgccacccagaccctgcccgcccatacctataagtaccctagcctgtaagcggtggtgggctctggcgttaagctggtcccccacctcagcaggtcgctctggcaataaacttgtgttgctgtcgagctgccagctcttcctgtgtctttttttaaccttcgccttcccttcaaaaactaacagatatgttaccattttgatgtatttcctttcagttttatctgtgcattcatatgtgagtgtatgtacacatacatatgtgtatrgttgtatgtatatatgtagtatacacataagtgtataatctggatatatccaactccgttatccatatcattggctatgtctacaacaatagtatagatactttttgtaacctgtctttttttgttgttaattattgtggatacatatcagttgtacctatttattgggtacatgtgatattttgatgcaagcatacaaaatgtaataatcaaaccagagtacttgggatgcccatcacctgaagcattgatcatttctttgtattaggaacattccaattccactctttcagttattttgaaatatacaataaattattaagtacaatcaccctattgtgctactgaacactaggtcataatccttctaactgtatttttatacccattatccatttccttgtcttttttaacttaatgtagtgtgagcatttccccatcatcaaatatcattttataaaattattttaaataactgcatttataaaatagccacattttataaaattattttaaataacctcactcgtgaatactggggtagctggggataaatttttargctcattgttattgtccctsaaaacgtggaagttattattccattgtctcatctactgctgctgatgatttaggctcattgttattttccctcaaaacgtggaarttattattccattgtctcatctactgttgctgatgagatgtctgctgttggcttggcaatcttttctttgcagcaaatctttcttttttcttttaaccttttggtgtttcctcattttttaaattttttcttttatcccaatgtgtctaggggtttatctactatctaataaataaatatgtatttttaatcctgtaaaagacttgatgtgccttttcaacccaagggttatcttttttaattctgaaaaattctcagccattgtcacttcaatgattacctcttgcccaactactcaatttttttttaattccccttaagcacatattggagtaaaactctattttactttgctcatctttctacatatctgtgctgtaaattggtcactctgtcttccaattcactcattcactcttcagctgtgcctagtctgctgtgaaacctatctagagagttgtttaaatcaatctctgtttttctgttttggacccattaacaaaaatacagctccatgtttcttttatgtaaaatgctgtatttaccttaaagttcttcttttaacttaattcttttcgatagtttaacacacataagtttatgaaacaatacgtacacctcaatgacttgtcacaaaggagtatctatgtcatcatcatctaggttagaaaaacaaaaaaggacactgccagcactccagaatccaccattgcgatgctccctagtctctattccctcccaaggtgaggattaacctgacgtttattatataaaaatcacttggttgattttctttaaagtttttattttgaaatgattgtagattcacagagagtcacaaaagtagtagacagagtcccttggatgctttaccyggctttccctaacagaacagctatcttacagaacagcaggacaccatcaaaaccagggcatgggcattgtctgactattgttagactacagaccttatgcagttttcacagtgtttgcatgcactcctttgtgtgtgtgtgttctatgcaaggtgatctcatgtgtagtatcctgtaaccacttgcaccaactgtccttgccaaagaactgtttcatcactgagaggaattcacttgtgctacctctttttagtcacatcctcgtaccttgtccctgtctcctggcaaccaccaatctgtcctccatctctatagttttgttagttggagtggaacaggaattaaaagaaattaaagaatgtgtaagcaaaaactcagttgtatgtaagaaaacccaattccccctgaggaagagaaagagctggagtcctttaaaaattaactgcctgtttttctgtggctagtgagccttatctctccctttcccaggcattatgaagaccctgtttctctagctgtgcagctccaaggtcactagacagataaactcaagttgtaaaatatgtttttccttgaaaagtaagaaataatgtaatgcaagtctcaattgaataactgtctttgtttctcgcttctgtaatatgcttccccctgcacaaatcttcccccacccatgaaatgcttaaaaggtaacttgactctttgttcggggctcagtcctttggatgttaatctgactgggccaatgcacctaaataataataataaatcctcctcaacccctcggtctctctgattcctaaattatcccacaacaggagaatgttttatacatggaagcttgtaagtgtaaaaccttttagaagattggcttttttcataagaggaagttttttctttcgtcaacaaaagccaaaagccaatcttcaacaaaagattggctttttttcaccaagtttcacgctctaacaaaacctccaagtttttgcctgtatcaataatttcttgctttttattcctgggtagtagtctcttatatggatatggtagaatttgttgagtctttcaccattgaaagatatttgggtggtttccagtttgaggctattttgaataaaacttttaagaacattgatgtacaggtttttgtgaacctgctttcattcttcaggttaaatcctgaagagtgaaattgctgagtcacataggacatgtacctttggttttataagaaactgccaaactcttttccagagtggctataccttgttcaagtgatgccagtgatgtgtgagttgtctggtttctaagcaatcttgccaggatttggtgtcatcattgagcttatcctttctaacagacatagcgatacttcattgttttaatttgcatttctctaatggttactgatgctgatcatattcacttgtgcttatttgctgttcatgttctttctttgacaaaatgtcttttcatgtcttttgcccacttttacaccggattgtttttttaaaaaaaatgtgttgaattttgaaggttcttcatagattctacatacaagtcctttgtcagctatatggtttgcaggtgttttcactcagcctgtagcatgtcttttcatcctcttaataagatccttcacagagcaaaagtcctacatattgaggaagttcattttgtcagtattttcttctacaaattgttatattggtgtcatgtctaacaacttagtcttgaatatttctcctatggtttcttctaaaagtttcatagtgttacattttttatttaaatctgtgctccgtttgaattaatgtttatataaaggtaggagctttaggttgaggttcaattttttgcttatgaaagttcaattgtttcagtagcatttgttgaaagattctcctttctctattgagttgtctttgcagctttgttagaaatcaattttccatgtcagtgtggatctattcctggatacagtctgtcccattgatctctgtgtctatccctttgctggaatcacactgtcttgattacttcagcattggagcagaactttaaaattgtgtagcatcgcttttctgacatcattcttttttctaccttttaatctttacatgtcttttaaaatcagattacctgatatacaacatatcctatggtgggatttcgatggagttgtattaaaagtatagatcaatttgggaagaattgaagtctttattaagtatttctacccatggatccatgtatttcttcattgatttaggtcttctgtgattttgtttacagcattttgtacattttcagcatacagatcttatatagactcaatcatttcattttttcagagatagtacaaatgcaattattttaaaatgttgattttctgttagttattgttagtatatacaaattaaatgagttttgtattttgaacttgtgctacttctggaatgtgtgtgtgtgtgtgtgtgtgtgtgtttgtgcacgtgtttatgtagtccttggaatayaccataaccaagtgggttcttcctgggaatgcaagactgcttcaatacttgaagatcagtcaatgtaatctgccatagtaataatctaacaagaaaatcaacatgatcacatcaattgatatagaaaaaaaatttacagaattcaacatattttcctattacagattttctgcaaactaggaatagaagcaagcttcttaacctgatgtatcgcaccttcaaaaagcctacagcaaacatcttacttagtgatgaaaaactgattgccttccccataagattgagaaccaggcaaggatgtttactctcatcactcctatccaacatggtactggaagtcctagccaatacaataagggaagaaaatgacacaaaataaaggtagtaagattagaaagaaagaaattgtctctattcacaaacaaggtgatttcttttcctttttcttctttttttttttaagagacaggttccttctctgtcacccaggcttaagtgcgatcatggctcattgtatcctcaaactcctgggcacacacagtcctcctgcctcagcctcccaagtagctaggactaccggtgcatgctgnnnnnnnnnnnnnnnnnnnnnnnnnnnnnnnnnnnnnnnnnnnnnnnnnnnnnnnnnnnnnnnnnnnnnnnnnnnnnnnnnnnnnnnnnnnnnnnnnnnnnnnnnnnnnnnnnnnnnnnnnnnnnnnnnnnnnnnnnnnnnnnnnnnnnnnnnnnnnnnnnnnnnnnnnnnnnnnnnnnnnnnnnnnnnnnnnnnnnnnnnnnnnnnnnnnnnnnnnnnnnnnnnnnnnnnnnnnnnnnnnnnnnnnnnnnnnnnnnnnnnnnnnnnnnnnnnnnnnnnnnnnnnnnnnnnnnnnnnnnnnnnnnnnnnnnnnnnnnnnnnnnnnnnnnnnnnnnnnnnnnnnnnnnnnnnnnnnnnnnnnnnnnnnnnnnnnnnnnnnnnnnnnnnnnnnnnnnnnnnnnnnnnnnnnnnnnnnnnnnnnnnnnnnnnnnnnnnnnnnnnnnnnnnnnnnnnnnnnnnnnnnnnnnnnnnnnnnnnnnnnnnnnnnnnnnnnnnnnnnnnnnnnnnnnnnnnnnnnnnnnnnnnnnnnnnnnnnnnnnnnnnnnnnnnnnnnnnnnnnnnnnnnnnnnnnnnnnnnnnnnnnnnnnnnnnnnnnnnnnnnnnnnnnnnnnnnnnnnnnnnnnnnnnnnnnnnacagcgcaatccattcaagttcacaggggcgggtggcacttgaaaatgtcagggtcaacttgcagggcagaagttagcagggaagtctttcctgggggagtgggagagcccagcagagtttaggaggagggaggggcgacatcggggcaatcctctgagtctctctttcctcctcaggaactgtccaggaagaccctgcagtctctctgcaggctcatgggagctcccagaactgagacaacacacggatccaggcctgcttcgaagtcagtgggatgcggcccttgaaagtcgatgtattgggttcctagggctctcgtgaaaacatgccacacctggctggttttaaacaacaggagtttattctgtcagttgagaaggctacaagtgcaaaatcaaggtattgacgggatgagttccaactagaggctgtgaggcagatcaactccatggctctctcctggcttctgctggtttctggcaaccgttcacttcccatgcctggtagacacatcactctaacctctgcctccctttttcatgggcacattcgcgcctgtgtgtgtgtgtgtgtgtgtgtgtggatgtgtgtgttaaggacagcaatcattagactagatggggcccactctaatccactgtgagcttctcttactttggtaacatctgcaaagaccctatttccaaacaaggtcacattccatgttctgggactgtcttctgagagatgtctcccccaggatccttccaggtggaaggatgccctttgacctgcaaagccaggcagaaaaccaggatcagggcaggacaagaggatgctagcctgtgatggctcccactcaggtgggatgtgagaagtgcctgtggcctgggacacaccaacttgctcnnnnnnnnnnnnnnnnnnnnnnnnnnnnnnnnnnnnnnnnnnnnnnnnnnnnnnnnnnnnnnnnnnnnnnnnnnnnnnnnnnnnnnnnnnnnnnnnnnnnnnnnnnnnnnnnnnnnnnnnnnnnnnnnnnnnnnnnnnnnnnnnnnnnnnnnnnnnnnnnnnnnnnnnnnnnnnnnnnnnnnnnnnnnnnnnnnnnnnnnnnnnnnnnnnnnnnnnnnnnnnnnnnnnnnnnnnnnnnnnnnnnnnnnnnnnnnnnnnnnnnnnnnnnnnnnnnnnnnnnnnnnnnnnnnnnnnnnnnnnnnnnnnnnnnnnnnnnnnnnnnnnnnnnnnnnnnnnnnnnnnnnnnnnnnnnnnnnnnnnnnnnnnnnnnnnnnnnnnnnnnnnnnnnnnnnnnnnnnnnnnnnnnnnnnnnnnnnnnnnnnnnnnnnnnnnnnnnnnnnnnnnnnnnnnnnnnnnnnnnnnnnnnnnnnnnnnnnnnnnnnnnnnnnnnnnnnnnnnnnnnnnnnnnnnnnnnnnnnnnnnnnnnnnnnnnnnnnnnnnnnnnnnnnnnnnnnnnnnnnnnnnnnnnnnnnnnnnnnnnnnnnnnnnnnnnnnnnnnnnnnnnnnnnnnnnnnnnnnnnnnnnnnnnnnnnnnnnnnnnnnnnnnnnnnnnnnnnnnnnnnnnnnnnnnnnnnnnnnnnnnnnnnnnnnnnnnnnnnnnnnnnnnnnnnnnnnnnnnnnnnnnnnnnnnnnnnnnnnnnnnnnnnnnnnnnnnnnnnnnnnnnnnnnnnnnnnnnnnnnnnnnnnnnnnnnnnnnnnnnnnnnnnnnnnnnnnnnnnnnnnnnnnnnnnnnnnnnnnnnnnnnnnnnnnnnnnnnnnnnnnnnnnnnnnnnnnnnnnnnnnnnnnnnnnnnnnnnnnnnnnnnnnnnnnnnnnnnnnnnnnnnnnnnnnnnnnnnnnnnnnnnnnnnnnnnnnnnnnnnnnnnnnnnnnnnnnnnnnnnnnnnnnnnnnnnnnnnnnnnnnnnnnnnnnnnnnnnnnnnnnnnnnnnnnnnnnnnnnnnnnnnnnnnnnnnnnnnnnnnnnnnnnnnnnnnnnnnnnnnnnnnnnnnnnnnnnnnnnnnnnnnnnnnnnnnnnnnnnnnnnnnnnnnnnnnnnnnnnnnnnnnnnnnnnnnnnnnnnnnnnnnnnnnnnnnnnnnnnnnnnnnnnnnnnnnnnnnnnnnnnnnnnnnnnnnnnnnnnnnnnnnnnnnnnnnnnnnnnnnnnnnnnnnnnnnnnnnnnnnnnnnnnnnnnnnnnnnnnnnnnnnnnnnnnnnnnnnnnnnnnnnnnnnnnnnnnnnnnnnnnnnnnnnnnnnnnnnnnnnnnnnnnnnnnnnnnnnnnnnnnnnnnnnnnnnnnnnnnnnnnnnnnnnnnnnnnnnnnnnnnnnnnnnnnnnnnnnnnnnnnnnnnnnnnnnnnnnnnnnnnnnnnnnnnnnnnnnnnnnnnnnnnnnnnnnnnnnnnnnnnnnnnnnnnnnnnnnnnnnnnnnnnnnnnnnnnnnnnnnnnnnnnnnnnnnnnnnnnnnnnnnnnnnnnnnnnnnnnnnnnnnnnnnnnnnnnnnnnnnnnnnnnnnnnnnnnnnnnnnnnnnnnnnnnnnnnnnnnnnnnnnnnnnnnnnnnnnnnnnnnnnnnnnnnnnnnnnnnnnnnnnnnnnnnnnnnnnnnnnnnnnnnnnnnnnnnnnnnnnnnnnnnnnnnnnnnnnnnnnnnnnnnnnnnnnnnnnnnnnnnnnnnnnnnnnnnnnnnnnnnnnnnnnnnnnnnnnnnnnnnnnnnnnnnnnnnnnnnnnnnnnnnnnnnnnnnnnnnnnnnnnnnnnnnnnnnnnnnnnnnnnnnnnnnnnnnnnnnnnnnnnnnnnnnnnnnnnnnnnnnnnnnnnnnnnnnnnnnnnnnnnnnnnnnnnnnnnnnnnnnnnnnnnnnnnnnnnnnnnnnnnnnnnnnnnnnnnnnnnnnnnnnnnnnnnnnnnnnnnnnnnnnnnnnnnnnnnnnnnnnnnnnnnnnnnnnnnnnnnnnnnnnnnnnnnnnnnnnnnnnnnnnnnnnnnnnnnnnnnnnnnnnnnnnnnnnnnnnnnnnnnnnnnnnnnnnnnnnnnnnnnnnnnnnnnnnnnnnnnnnnnnnnnnnnnnnnnnnnnnnnnnnnnnnnnnnnnnnnnnnnnnnnnnnnnnnnnnnnnnnnnnnnnnnnnnnnnnnnnnnnnnnnnnnnnnnnnnnnnnnnnnnnnnnnnnnnnnnnnnnnnnnnnnnnnnnnnnnnnnnnnnnnnnnnnnnnnnnnnnnnnnnnnnnnnnnnnnnnnnnnnnnnnnnnnnnnnnnnnnnnnnnnnnnnnnnnnnnnnnnnnnnnnnnnnnnnnnnnnnnnnnnnnnnnnnnnnnnnnnnnnnnnnnnnnnnnnnnnnnnnnnnnnnnnnnnnnnnnnnnnnnnnnnnnnnnnnnnnnnnnnnnnnnnnnnnnnnnnnnnnnnnnnnnnnnnnnnnnnnnnnnnnnnnnnnnnnnnnnnnnnnnnnnnnnnnnnnnnnnnnnnnnnnnnnnnnnnnnnnnnnnnnnnnnnnnnnnnnnnnnnnnnnnnnnnnnnnnnnnnnnnnnnnnnnnnnnnnnnnnnnnnnnnnnnnnnnnnnnnnnnnnnnnnnnnnnnnnnnnnnnnnnnnnnnnnnnnnnnnnnnnnnnnnnnnnnnnnnnnnnnnnnnnnnnnnnnnnnnnnnnnnnnnnnnnnnnnnnnnnnnnnnnnnnnnnnnnnnnnnnnnnnnnnnnnnnnnnnnnnnnnnnnnnnnnnnnnnnnnnnnnnnnnnnnnnnnnnnnnnnnnnnnnnnnnnnnnnnnnnnnnnnnnnnnnnnnnnnnnnnnnnnnnnnnnnnnnnnnnnnnnnnnnnnnnnnnnnnnnnnnnnnnnnnnnnnnnnnnnnnnnnnnnnnnnnnnnnnnnnnnnnnnnnnnnnnnnnnnnnnnnnnnnnnnnnnnnnnnnnnnnnnnnnnnnnnnnnnnnnnnnnnnnnnnnnnnnnnnnnnnnnnnnnnnnnnnnnnnnnnnnnnnnnnnnnnnnnnnnnnnnnnnnnnnnnnnnnnnnnnnnnnnnnnnnnnnnnnnnnnnnnnnnnnnnnnnnnnnnnnnnnnnnnnnnnnnnnnnnnnnnnnnnnnnnnnnnnnnnnnnnnnnnnnnnnnnnnnnnnnnnnnnnnnnnnnnnnnnnnnnnnnnnnnnnnnnnnnnnnnnnnnnnnnnnnnnnnnnnnnnnnnnnnnnnnnnnnnnnnnnnnnnnnnnnnnnnnnnnnnnnnnnnnnnnnnnnnnnnnnnnnnnnnnnnnnnnnnnnnnnnnnnnnnnnnnnnnnnnnnnnnnnnnnnnnnnnnnnnnnnnnnnnnnnnnnnnnnnnnnnnnnnnnnnnnnnnnnnnnnnnnnnnnnnnnnnnnnnnnnnnnnnnnnnnnnnnnnnnnnnnnnnnnnnnnnnnnnnnnnnnnnnnnnnnnnnnnnnnnnnnnnnnnnnnnnnnnnnnnnnnnnnnnnnnnnnnnnnnnnnnnnnnnnnnnnnnnnnnnnnnnnnnnnnnnnnnnnnnnnnnnnnnnnnnnnnnnnnnnnnnnnnnnnnnnnnnnnnnnnnnnnnnnnnnnnnnnnnnnnnnnnnnnnnnnnnnnnnnnnnnnnnnnnnnnnnnnnnnnnnnnnnnnnnnnnnnnnnnnnnnnnnnnnnnnnnnnnnnnnnnnnnnnnnnnnnnnnnnnnnnnnnnnnnnnnnnnnnnnnnnnnnnnnnnnnnnnnnnnnnnnnnnnnnnnnnnnnnnnnnnnnnnnnnnnnnnnnnnnnnnnnnnnnnnnnnnnnnnnnnnnnnnnnnnnnnnnnnnnnnnnnnnnnnnnnnnnnnnnnnnnnnnnnnnnnnnnnnnnnnnnnnnnnnnnnnnnnnnnnnnnnnnnnnnnnnnnnnnnnnnnnnnnnnnnnnnnnnnnnnnnnnnnnnnnnnnnnnnnnnnnnnnnnnnnnnnnnnnnnnnnnnnnnnnnnnnnnnnnnnnnnnnnnnnnnnnnnnnnnnnnnnnnnnnnnnnnnnnnnnnnnnnnnnnnnnnnnnnnnnnnnnnnnnnnnnnnnnnnnnnnnnnnnnnnnnnnnnnnnnnnnnnnnnnnnnnnnnnnnnnnnnnnnnnnnnnnnnnnnnnnnnnnnnnnnnnnnnnnnnnnnnnnnnnnnnnnnnnnnnnnnnnnnnnnnnnnnnnnnnnnnnnnnnnnnnnnnnnnnnnnnnnnnnnnnnnnnnnnnnnnnnnnnnnnnnnnnnnnnnnnnnnnnnnnnnnnnnnnnnnnnnnnnnnnnnnnnnnnnnnnnnnnnnnnnnnnnnnnnnnnnnnnnnnnnnnnnnnnnnnnnnnnnnnnnnnnnnnnnnnnnnnnnnnnnnnnnnnnnnnnnnnnnnnnnnnnnnnnnnnnnnnnnnnnnnnnnnnnnnnnnnnnnnnnnnnnnnnnnnnnnnnnnnnnnnnnnnnnnnnnnnnnnnnnnnnnnnnnnnnnnnnnnnnnnnnnnnnnnnnnnnnnnnnnnnnnnnnnnnnnnnnnnnnnnnnnnnnnnnnnnnnnnnnnnnnnnnnnnnnnnnnnnnnnnnnnnnnnnnnnnnnnnnnnnnnnnnnnnnnnnnnnnnnnnnnnnnnnnnnnnnnnnnnnnnnnnnnnnnnnnnnnnnnnnnnnnnnnnnnnnnnnnnnnnnnnnnnnnnnnnnnnnnnnnnnnnnnnnnnnnnnnnnnnnnnnnnnnnnnnnnnnnnnnnnnnnnnnnnnnnnnnnnnnnnnnnnnnnnnnnnnnnnnnnnnnnnnnnnnnnnnnnnnnnnnnnnnnnnnnnnnnnnnnnnnnnnnnnnnnnnnnnnnnnnnnnnnnnnnnnnnnnnnnnnnnnnnnnnnnnnnnnnnnnnnnnnnnnnnnnnnnnnnnnnnnnnnnnnnnnnnnnnnnnnnnnnnnnnnnnnnnnnnnnnnnnnnnnnnnnnnnnnnnnnnnnnnnnnnnnnnnnnnnnnnnnnnnnnnnnnnnnnnnnnnnnnnnnnnnnnnnnnnnnnnnnnnnnnnnnnnnnnnnnnnnnnnnnnnnnnnnnnnnnnnnnnnnnnnnnnnnnnnnnnnnnnnnnnnnnnnnnnnnnnnnnnnnnnnnnnnnnnnnnnnnnnnnnnnnnnnnnnnnnnnnnnnnnnnnnnnnnnnnnnnnnnnnnnnnnnnnnnnnnnnnnnnnnnnnnnnnnnnnnnnnnnnnnnnnnnnnnnnnnnnnnnnnnnnnnnnnnnnnnnnnnnnnnnnnnnnnnnnnnnnnnnnnnnnnnnnnnnnnnnnnnnnnnnnnnnnnnnnnnnnnnnnnnnnnnnnnnnnnnnnnnnnnnnnnnnnnnnnnnnnnnnnnnnnnnnnnnnnnnnnnnnnnnnnnnnnnnnnnnnnnnnnnnnnnnnnnnnnnnnnnnnnnnnnnnnnnnnnnnnnnnnnnnnnnnnnnnnnnnnnnnnnnnnnnnnnnnnnnnnnnnnnnnnnnnnnnnnnnnnnnnnnnnnnnnnnnnnnnnnnnnnnnnnnnnnnnnnnnnnnnnnnnnnnnnnnnnnnnnnnnnnnnnnnnnnnnnnnnnnnnnnnnnnnnnnnnnnnnnnnnnnnnnnnnnnnnnnnnnnnnnnnnnnnnnnnnnnnnnnnnnnnnnnnnnnnnnnnnnnnnnnnnnnnnnnnnnnnnnnnnnnnnnnnnnnnnnnnnnnnnnnnnnnnnnnnnnnnnnnnnnnnnnnnnnnnnnnnnnnnnnnnnnnnnnnnnnnnnnnnnnnnnnnnnnnnnnnnnnnnnnnnnnnnnnnnnnnnnnnnnnnnnnnnnnnnnnnnnnnnnnnnnnnnnnnnnnnnnnnnnnnnnnnnnnnnnnnnnnnnnnnnnnnnnnnnnnnnnnnnnnnnnnnnnnnnnnnnnnnnnnnnnnnnnnnnnnnnnnnnnnnnnnnnnnnnnnnnnnnnnnnnnnnnnnnnnnnnnnnnnnnnnnnnnnnnnnnnnnnnnnnnnnnnnnnnnnnnnnnnnnnnnnnnnnnnnnnnnnnnnnnnnnnnnnnnnnnnnnnnnnnnnnnnnnnnnnnnnnnnnnnnnnnnnnnnnnnnnnnnnnnnnnnnnnnnnnnnnnnnnnnnnnnnnnnnnnnnnnnnnnnnnnnnnnnnnnnnnnnnnnnnnnnnnnnnnnnnnnnnnnnnnnnnnnnnnnnnnnnnnnnnnnnnnnnnnnnnnnnnnnnnnnnnnnnnnnnnnnnnnnnnnnnnnnnnnnnnnnnnnnnnnnnnnnnnnnnnnnnnnnnnnnnnnnnnnnnnnnnnnnnnnnnnnnnnnnnnnnnnnnnnnnnnnnnnnnnnnnnnnnnnnnnnnnnnnnnnnnnnnnnnnnnnnnnnnnnnnnnnnnnnnnnnnnnnnnnnnnnnnnnnnnnnnnnnnnnnnnnnnnnnnnnnnnnnnnnnnnnnnnnnnnnnnnnnnnnnnnnnnnnnnnnnnnnnnnnnnnnnnnnnnnnnnnnnnnnnnnnnnnnnnnnnnnnnnnnnnnnnnnnnnnnnnnnnnnnnnnnnnnnnnnnnnnnnnnnnnnnnnnnnnnnnnnnnnnnnnnnnnnnnnnnnnnnnnnnnnnnnnnnnnnnnnnnnnnnnnnnnnnnnnnnnnnnnnnnnnnnnnnnnnnnnnnnnnnnnnnnnnnnnnnnnnnnnnnnnnnnnnnnnnnnnnnnnnnnnnnnnnnnnnnnnnnnnnnnnnnnnnnnnnnnnnnnnnnnnnnnnnnnnnnnnnnnnnnnnnnnnnnnnnnnnnnnnnnnnnnnnnnnnnnnnnnnnnnnnnnnnnnnnnnnnnnnnnnnnnnnnnnnnnnnnnnnnnnnnnnnnnnnnnnnnnnnnnnnnnnnnnnnnnnnnnnnnnnnnnnnnnnnnnnnnnnnnnnnnnnnnnnnnnnnnnnnnnnnnnnnnnnnnnnnnnnnnnnnnnnnnnnnnnnnnnnnnnnnnnnnnnnnnnnnnnnnnnnnnnnnnnnnnnnnnnnnnnnnnnnnnnnnnnnnnnnnnnnnnnnnnnnnnnnnnnnnnnnnnnnnnnnnnnnnnnnnnnnnnnnnnnnnnnnnnnnnnnnnnnnnnnnnnnnnnnnnnnnnnnnnnnnnnnnnnnnnnnnnnnnnnnnnnnnnnnnnnnnnnnnnnnnnnnnnnnnnnnnnnnnnnnnnnnnnnnnnnnnnnnnnnnnnnnnnnnnnnnnnnnnnnnnnnnnnnnnnnnnnnnnnnnnnnnnnnnnnnnnnnnnnnnnnnnnnnnnnnnnnnnnnnnnnnnnnnnnnnnnnnnnnnnnnnnnnnnnnnnnnnnnnnnnnnnnnnnnnnnnnnnnnnnnnnnnnnnnnnnnnnnnnnnnnnnnnnnnnnnnnnnnnnnnnnnnnnnnnnnnnnnnnnnnnnnnnnnnnnnnnnnnnnnnnnnnnnnnnnnnnnnnnnnnnnnnnnnnnnnnnnnnnnnnnnnnnnnnnnnnnnnnnnnnnnnnnnnnnnnnnnnnnnnnnnnnnnnnnnnnnnnnnnnnnnnnnnnnnnnnnnnnnnnnnnnnnnnnnnnnnnnnnnnnnnnnnnnnnnnnnnnnnnnnnnnnnnnnnnnnnnnnnnnnnnnnnnnnnnnnnnnnnnnnnnnnnnnnnnnnnnnnnnnnnnnnnnnnnnnnnnnnnnnnnnnnnnnnnnnnnnnnnnnnnnnnnnnnnnnnnnnnnnnnnnnnnnnnnnnnnnnnnnnnnnnnnnnnnnnnnnnnnnnnnnnnnnnnnnnnnnnnnnnnnnnnnnnnnnnnnnnnnnnnnnnnnnnnnnnnnnnnnnnnnnnnnnnnnnnnnnnnnnnnnnnnnnnnnnnnnnnnnnnnnnnnnnnnnnnnnnnnnnnnnnnnnnnnnnnnnnnnnnnnnnnnnnnnnnnnnnnnnnnnnnnnnnnnnnnnnnnnnnnnnnnnnnnnnnnnnnnnnnnnnnnnnnnnnnnnnnnnnnnnnnnnnnnnnnnnnnnnnnnnnnnnnnnnnnnnnnnnnnnnnnnnnnnnnnnnnnnnnnnnnnnnnnnnnnnnnnnnnnnnnnnnnnnnnnnnnnnnnnnnnnnnnnnnnnnnnnnnnnnnnnnnnnnnnnnnnnnnnnnnnnnnnnnnnnnnnnnnnnnnnnnnnnnnnnnnnnnnnnnnnnnnnnnnnnnnnnnnnnnnnnnnnnnnnnnnnnnnnnnnnnnnnnnnnnnnnnnnnnnnnnnnnnnnnnnnnnnnnnnnnnnnnnnnnnnnnnnnnnnnnnnnnnnnnnnnnnnnnnnnnnnnnnnnnnnnnnnnnnnnnnnnnnnnnnnnnnnnnnnnnnnnnnnnnnnnnnnnnnnnnnnnnnnnnnnnnnnnnnnnnnnnnnnnnnnnnnnnnnnnnnnnnnnnnnnnnnnnnnnnnnnnnnnnnnnnnnnnnnnnnnnnnnnnnnnnnnnnnnnnnnnnnnnnnnnnnnnnnnnnnnnnnnnnnnnnnnnnnnnnnnnnnnnnnnnnnnnnnnnnnnnnnnnnnnnnnnnnnnnnnnnnnnnnnnnnnnnnnnnnnnnnnnnnnnnnnnnnnnnnnnnnnnnnnnnnnnnnnnnnnnnnnnnnnnnnnnnnnnnnnnnnnnnnnnnnnnnnnnnnnnnnnnnnnnnnnnnnnnnnnnnnnnnnnnnnnnnnnnnnnnnnnnnnnnnnnnnnnnnnnnnnnnnnnnnnnnnnnnnnnnnnnnnnnnnnnnnnnnnnnnnnnnnnnnnnnnnnnnnnnnnnnnnnnnnnnnnnnnnnnnnnnnnnnnnnnnnnnnnnnnnnnnnnnnnnnnnnnnnnnnnnnnnnnnnnnnnnnnnnnnnnnnnnnnnnnnnnnnnnnnnnnnnnnnnnnnnnnnnnnnnnnnnnnnnnnnnnnnnnnnnnnnnnnnnnnnnnnnnnnnnnnnaccgcgaggcggggacagagtgtcagcccctcttcccccactggcttttgggacccccatcgcgatggggggaggcacccccagcgaggcggggactgacagccagcaactcttctgccccgggctcttgggacccccatcgcaggggcgggaggcaccccccgcgagccaggttctgagagccagcccctcttcccctctggctcttagaacccccatcgcagtggagggatgcaccccccgcgaggcagagactgagagaaagcccctctttccccccggctcttgggacccccatcgcaggcgggggaggcaccccccgcgaggcggggactgagaggcagcccctcttccccacctggctcttaggtcccccatcgcgggagggaagcaccccccacggggcggggactgagagccagcgcctttccccccggggctattaggacccccatcgcaggagggtgagacacaccccagaaggctgggactgagagccagcccctctccccccgctggctattaagacacccaacgcagggggtgaggcaccccctacraggctgggactgagagccagcccctctttcaacctggctcttaggacccccatggcagggggggaggcatcccccacgaggcggggactgagagccagccccctcttccccctctggctgaggacccccaccgcggattctaagatccttagcacccacctggaggactgtgggttttaggtgtccaagaagaaagctcagatcttccagcagaaggtgccttacttgggatttactatccgacaggggtctgaacgcagctcgggatcagaaaaaaagcaggtcatttgcaatgtaccggagccagccccccttcccctctggctcttaggasmcccattgctggtgagggaggcaccccccgcgaggcagggactgagagccagcctctcttcctcccctggctcttaggacccccattgcgggggggggaggcaccccacacgaggcggggactgagagccagcccctctgcgccccctggctattaggacccccatcacagcggggagaggcaccccccgcgaggcagggacggagagcctgcccctcttccccccgtggctcttaggacccccatcgcaggcgcttggcaccccacgcgaggcaggtactgagagccagctcctcttcccccccgtgtcttaggacagccatcgcagcgggggaggtaccccccgtgaggcagggactgagagccagcccctcttcacctctcgctcttcggcccccatcgcagggaggaggaggcaccccatgcgaggcggggactgagagccagccccacttcccccctggctcttgggaccaccatcgcagtggggggaggtacacaccacgaggcggggacggagagtcagcccctcttcccccactggcttttgggacacccatcccgggggggaggccccccccccgcgaggcggggactgagagccagcccgtcttcgccccctgactcttaggacccccatcgcagtggggggatgcaccccccgcgaggcagagactgagagaaagcccctctttcccccctggctcttaggacccccatcgcaggcgggggaggcaccccccgtgaggcacggactgagagccagcccctcttcccccactggctaagacccccattgcggatcctaagatccttaggacccacctggaggactgtgggtattaggtgtccaagaagaaagctcagatctgccgacggcaggtaccttacttgggattttctatacgacaggggtccgaacgcagcccgggatcagaaagaaagcaggtcgtttgcaatctaccggagcctaagggcagaaggcaggttagagaattcttaggagctgtggggttttgtagactgtggattccaaactttgcagtattagccaagcctttgtatgaggtcacaaagggggtggggaccggaaagctttccaatggggatcccaacaacaggaaggctttcatgagttaaaggaaaaacttctggcagccccagccctggggctacccgatgtgacaaagccttttccattgtatgcttcasagagagaaaagatggcagctggacttttaacccaaactgtggggacctggctgaggccagtggcctacgtctctaaacaactagacagggtttctaaaagatggcccccctgttggagggccttggcagcaactaccctgctagtactagaagcaaataagctgactcttgggcaaaacctgaacataaaggccccccatgctgtggtgactgagagccagcccctcttccccccctggctcttaggatccacggtggactcacagcctgtttaccatattgtgagtaatatcatctccccctctggagacctccggagattatgaactgtttcacagacgggtgtacaccctcagtgtacagagggcgtacacccatctgtattgggagtaatatcatcctcttcctccctgaatattaagaacagtatcacaggggtgtttctactccctgcgatatcgcgtgtcatatcctcctctcccaccttgcaattagaaacaatatcagtgggggcgtgtccaccttctgtcatattgaaagtaatatcattttcttcctccaggaccgtnnnnnnnnnnnnnnnnnnnnttgtgaagcttcccattttatctatttaagcaaaggacaactcctgtcttcttcagaaaagaaatacttctgagaaaccaagtgtttaagatggaaataacagcatatggtagacactaacatgaggtacgaggactgtcagtacatctaaattacagcaagtgggatcaccattcctcwgcagtgtaagctttgatttttcccttgcatttttatttctctcaactcaaaacacacacagacacccacccacacagatatttaattatagagaaaatactaggtaagatcagacaaactgtagcagtaatcagcaatgattcaccagtaatgaatccaataagaagaaagatgtgaagatgttttagaagagaacgtgggaaagtttttgatttttctatgaaggagtaagagctcwtctccatcagggtcctcctgttgtaaggaataagtttggaatacattaaaaataccacaaagcaatttgaatacaatttgcatgcaaattaaatatcagagtgtgtggattagatatgcattctgggtttcaagaacaggagtgmtgattatgaggaaggatgctgaagaaaagctcagggtatttcaggggccatcagagcatgctaaaatgccatgataggagattttgagcaaccacagggraaaaaaggaggggaaaggagatagaaratgggctggagatggacaggtatctgcaaagaaaggaagttggaagggagggatttacgtaaatatggacaggaaaagggttggattttgccaaggatatacttcacctcatttgtactttggccccggggcaagcttggcctttgaatttttccttgagagggtcttagaaaaacttgcttcattgaaacaatatgaattactagatattctccccagaactttcttgccattcatggacaggaataaactttccttcctcatacactcacagccccctccctttatacattgactgtctccaaatttatgaaagtttcttttctaggttccctttctctcccctcccttctatttctagtttaatttctgaagaggactgactcgggaaggactagagactgaataaggcagacaagagactcagaagragtcacatccaggctgtagttaaacatgcacaaagcaggaatggtgctgctgaccaacccaccacaggcccaggactgcagtgcctcagaaggtttcatakgcacaggaagaatattcatattccagatcaggaaagccagaggcagggcaaggcaggcaatgcccaggaacaaggaaagcctggtgcttctcctctctcacctcccaggsgtggttgaaaagctggccatcattcttaaagcagccgcttgttttctgttggcttgaaagccagattaaggtctgtttttgaacattttcatcaatgaatacawattttttcattctctccartgtcttaaaagtaagagcactgagyctgtaatacaaatcaccaaagcaaaagttagataaagaggaagtgacaatgtcagcaattccacagkttcatcaccaytgttccctttgagtaaaggatgcattcaactcatctactgtaaaccatctttattgttagtggccctttcctttgggtcaggaaaatattatgactagcaataagtggaaattagagtaggtaattttcagcatgtttgcacccaaaggtcctgttgtatatagcccattagattatctgcacatggagagagaaatgatgtaattaggtattttgggtccttctaatttcactttcccgaatctatatgggactctgagaagcacagagtaagacgtgccgtgccctcttcggtggagttaaccagcggtgcatgtmtaggggctgtcatgaagggatcagactgctaagcaaatcgtcatgagactgaaggaacattgttgcattagaattggaatcactaaatctttagttttatctatttctcttcygtaaattgactttgaaacccactttgcttctaaatccccactgaactctatcctccttcacctccttgcaagccctcctcaggtaattcctatattatataaaataaaatttttatgtctcaccatakgcttcctttctgaytctgctgccaaaacacactataggaaccatcagagtttttgaaagataattgcctttgataacctaaaatagaacattgtaggaaattattttttaacctaagaaagttagaagagaaagaatagtgcagtgcaagccctaggtattggtgttagacacaaatcactaggatgatcatttccatttgaacttctgaaactcaggttctgtattcataagggagaaaaaataactcttactttataggattttgatcacaagataatacacatggatatgtctggctcagtaattgcctcgtcattggtacctactaactattcagtatatttcccctaaggtcattttatttcagtgttatctttctgagaagaaaaaccaaagaagattattttatgctcctggacttktccttaacctcacakttcacaacattggccctctttstgtatacaaagccaatcacttcactgcaacagaccacagctgagcaaacaaatacagacgytgatagatgaaccactgacaacaactcctaacaaaaacaacaataataacaacaataaacaaggtagcttgcaaaataccagacattaaaaaaaaattaagtgcatagcttgaaaactttgcagctgtaaattatgamgctagctgaccacacagattttgaagtcagacggaaaacagcgctaggactgagagttcctcggttcaggttcacttttctttcaccagactactgcataaaaacagcttatgacrtcttggtaygagtaacaattgctttcaamaattatgggcagaaattacttaawtcttctcaccattagataagagaaagaaagccttagattgaacttcctctgtcagttgctcagtagatttcagatagtccagaacataagtatcagatgctagtagggcagcattctgctctccacctccatagggcatttggagaacaaccagattctgcatggcaagtcctagaatatcccctaaaaacaggaaaagcggaaagctgtattgtttatagttgccatctcagcattaataactatagacaaaagaggcatagtgaaataggtaacatttaaaattgagtctaaatggtggaaacaaagaaagttttatgaagcaatttgaaagaagagacagccatgaagggtgaagttaaactgctatgaaaaatatttctgaaaatctcattactagagagaggaggaagttaggagaatgcatttgtttgcttgtttgctagttttttttttaatcaatcaaycctatgaattacaaagtgtaatccatcccttccaagagatgttcatgttaataacagacaaagaagtttgcctttcgtatcaacaacaaacatttctccttttattgagaaaactcccaacatcattaacaggcaacgttaattcgattctccaagaggtgaatttcatatttcagattaatgattataaagaacctcttgctttctgaacactagttaccatctacccaagctaaggtttcctgggaatacaggtccggaaacggtactgtaatccctttagatcccatcaggaaacmtagaggatgatctgawcaataattccctccaattgatagcttaggaaratctctcyattctrttattttaaggatttttaaagaccacctcaaccaagattttcaaatcatagtgaaacacaaaatttrwtcaacttacccacaacagtgaaaaagcctctggctgacccttctdctacatcrtttggcaagtccaaaactccctgcttggaggctttggcacctagaatgaaaatactgatttaaaaaatgtgatggcttctttatatcagcagatttgggggataaacatattggaaataagattccattacttatttttattttacaagttgtttattagaggagatgaatttggagttttgacccagtttaggataatagtacattcagaaaatggcatayaaatctgtgtgttagattgtggcccccgttcttcactggtttagtgcctgaactatttatgtatgaaaaaatgtaaaaactacactgactgtaacacataaaacaacacacacaaaaggtaaagcttgaagactcwgatraaggagtataatcagatcaccatcaaccaggtaaaataatacccctcatggccataaaaccggagactgaggkgcaggggcagtgawgtatctatgggttattttctcctaagagtacaaaagccaagattatattatgtgctattgggcctcaatcctaatatctcattgtccaatattgtgtgacaaccatatcataagaggagctaagartacacatgatggraaaaaaaatagataggagcagaccagcctcagaaagtgaactaaaaaccacctcctgaatattctttttgatggmtaaamttataccataaagataaagcatgaaacacaagaatcctccaygagttatttaaagtgaaatcacagggcacatggactcatgtggaaggagaggacatgamctgattcttttggtgaattttatttaggactaatttgactccctaaaagatcctcttaccttctgtacagataaggaaactctgggtcctttccttttcaataccttcaggctgtcaaagaataacacaaacaagcacagaagaatgagtctagatcctctgtccatgaaggaaaagtgattaagcaccagctcactyaagcatggctggtgcaagtttatccctgagagaagatccaactcatsktccccttttgttcatatctggaaggcacgggacatcacyggyacccattttagcctctgcgttctgtagcttggacaggcattatcttgatgtcactgtgkgacactctcagctcctctgatcctgtatagcatctccagtaaacaactaaaagtgctttgtggagcagggattgccaagaggcaaatcaagagtgttcctctgacaagtgctgattcttgttgaggatgacgggaactgcaygggagtgtaggacaartagatttgtctcttgaatttgagaatcrgaaaaagagaaggaagagaaataggtgtacaggaaacatcttgactcagaaacaaacaaaaaattgtcaagtctrtttcaaatgttaagttttactatcctgggtgaggtattaattaaagaaaggatgaactttatgctgttttaattcatttaaaatggcatgtcttgtgtcaaaagtaaatgttgtcaactaattaagtctcttcaatgagaagatcttttartacaaaacctcttagatgtctgtttcttttcaggaaaagcttgactgtttgcatatccatacctctactaagaagctttkgaccacagtgtctttccagtttagcttttgctgctccattccttcatttgggcaagcactgctttgtttggactcagcaactacagtgatattcactttacctggaagacattcccaaatataaattaaattgatcattggtcccttctgtaatgagaaatgactagagtctgtgaaccatgtcttgaattggattaaccaaattctatcattaagttaatgcttagaacaaaataacttatttcttctccttcctaggtataatgtggtatcttccatttcacctgttccatgattttcatgattccttacattaaatgataaatttacttaattaaaacttaagaaattttaggaaaagtaacattttacaaagttgtctgagtcaatttcytgatattgattgtttataaaggttacttatgacaatataggctaataatgtcagcgaactagggctcctaacttcccaaaatcaagcaagcatagtaaaatatgatatagtagataggcactggattgaaataatgtcctagcaaggaatccattgtttttaaacttcctgatttcacattatgtaattagaactgatctccagtttccttgcttgtraaaattacaggattgaaaacaatcattcytttaaggttaktattatttacgtgactatataccaatatacataaccaatatattgttctytttgttgttgttgttgttgttgkgttttaktgtttctctgtctcaggaagcttgctatttcactcttaaaactgtgtcttcgacttaatgtcataaaactatacaagttggtacartattctgtctcaattgccaaggtaggattttgaagatcttgtgcagtagaaatattgagaaacttcaaatctartagaaaaatagtctgagaacagcatcacaactgagctaaaataatctcatagatatattatttgctgttaaaataatacaatgaatatagtacattaaagaamatttgaatgrccattttttaaaagtagtgattaaaagtgtcacgcacatygtatctagcattccttgtttactagarttttaaactttttccattccatgtattttcaatatttcaataggagacaagtttatttttccatcttgcagatagcataggcactaagacaatattctcagtttttkatctcaatccaatcatttagtgattttggtatccccatggcacatctagtaaatttacaaacctgacaattccctcattggtcattgtgatggagcagcaattttcktgaaggtggcctgggttcatgatggtaggtgaaggacccagcgagaagtcaaataattaaggtggcattaatgatarcatggccttcrtttgggatatggcatatgccaaacatatagtccrtgataggtcatgccagttagcatttatattgtattttaattacattatgctcttgtaaaaatgaatggtggttttgatctacacagcattaacaaccagaaattagattactatagattagaatttctaatggagaatttacaataagaattttaaaaatgtgagggagaaaatcacgtttgtatagacaatwtaaggaaagtaaatggagacaataaatatgggctggtttttccatgrgtgactggtgtagacagatagctgcttacccaatttcttaggtataatagtccagaygtttgttttcctccctccagcttgaataacctcactgccattgattttcmaggtatkaatatttgcttcataattctgagactcctccacttgaacagaaatctaagaaaacaatcatggcaatgaggatagcactggaacacacatcactatgaaacaccatgctcaatacactgtttaaactgtcactgtgaatgaaagcaattgtatttgtttgaggaatayggacctaagtcttayacctttatagtagcattttgcacttgaggataaagagaatatggaaatattaagaaatattttagctttgttagatttttgcctccagatcaaacagaacaackcacctctacacatgtattcmggtagctgaaggcattgacaatcaaatcaaattgttcattttgaacaaccraaaagggtgaggcaatttcaataaagaaaggttgggagacttctagagtggttgtagaggaaatgccaaatccaacgtcrccattcacacaaaagccacttgcctcccattgggttatcgtatcaggaatgaggaacraaagattggcagagcctgaggaactggaagaagaggttatcrgtaaaacacattctttgtctgaaccaagaacttaaaattaagtgcagagcaagcagaaaagtattgactgaagctcaaaagtgagttatattgtttggatggggcattagataaaaataatgagagctggatttttataaaatttgagtatagaaaggtcatttttctttaaacgccacatttttttttaattggggcaggttaaatctgtctgcataaaatgaatagaagagaaactcttggtgaagggaaaacaatgctagagaaaaaaataaaataaaatgtatgataagtacatgcaaatcaatgatayatattttacaaatatggtactgttttatatacccaggaataaacmtgaagaaagaaaaagaaaatagaaataaagacacayaggagagaaaatggttaaaactcactcgacactgacgaggtcccacatccatgtctctgggaagtttgttcttactgtttgaattatagcctgttctacatagtcagcattctcccctctgattccactagctaaaaaaaaaaaggaagaagtaccttattcagaccttggactctgcaaattatrgtctatatattatcagggtgtaaggtctccataaaacacctcactttcctgtatcacagtcacttactatgactgttttcctgtatcaccatacattgcctgttccyctacacagtcaggtaccacataatgacactgtgatcaatgacagaccacttagactacagtggtcccataaagttagaatggagctgaaaaattcctaccacttattgacatcaaagccatcataacgttgtagtgcaatgcattggtcatgggtttgtggtaatgctggtgtaaacaaacctactgcactgccagtcctataaaaatatagcagacacaattttgtacagtacataatacttgataatgatgactatgttaccggtttttgtgcttactatactatactgtttactgtttagagtgtactgttcttacttatcaaaaaaattaactgcaaaacagcttcaggcaggtccttcaggagatgttccagaagaaggcattgctatcatagatgatgacagctccatgcatgttattgccccagaagaactttcagcggtacaagatgtggaggtagaagacagtgatattgatgatcctgaccttgtataggcctagattaatgtgtgtgtttgcatcttcgttttaaacaaaaaagtataaaagttaaagaaaatttaaaaataggaaaaagcttatagaataagaatgtaaacaaagaaaatatatttgtaccctgactcactcagagtaacttttaaccttgcaagctccattcatgggaagtgctctatataaaagtataacttttttttatcttgtataccacatgttcactgtgccttttccatgtttagcaatgattagatacacaaatagttatcatcgtggtacaactgcctacagtattcagtatagtcacatgctgcggaggtttgtagcctaggaaaaatgggctgtaccacatagcmtaggtgtgttgcaggctacagcatctaggtttgcgtaagtacactctatgaygttcgcacaacaatatcacctaacaatgcatttttcagaacaaattctccatcactaagtgaagcatgaytgtatttctgacattgtattttatcaataaaaataaactacatctcacatctgaagctaatttcttgttatagccaaaagcaygtctagtctgtcttattctgctttatccaactataggatgtctaattgtagccaaaaacatggcataattcacacataaaattccaaaattgcatcatttatcccaaatacactaaattccacaaagcggtttggtcatcccccaacaaaaaaatgtaagattacctacatgcaattctagacggaacactaygcattggaccataattttctgtttcyagataaagcggcttagggagtggcagccttctctccatcacacatacttctggttttcggtaatggagattggtaaagactttkagacccatgttctttaaagaaacaaacaacaaaaatattgttcattcttttcatgcaagaactataaaaggcctattatttatattgcaaagataaatggatcataagtatccatattttctgtgttaacaaaggtctgagaagttacaagtcaacttacctctatttgacttatggaaaatccctaatttagagaaaaaattataatcactatgatttatctagcacttattatgtgctagcatttttctaagtattttccattattctccatttcatcctaagtggaaaatacttatgagatcagcactatcattaccctaattaacatcaaacacacacacacacacacacacacacacacacacccggcacactcagtaaattaaagaactggaacctgataaagtytgtctgattcaataccccttttcttacacacttgtgatgttaattataragattatttcatggaaggctcagcatgtctcattaatggcctagggatatctggagtccacactctcttagcctcttgatttgacaatctttgcataagatttattgtattaattggagrctgtcttatttttttaagtgaggttttgtaattatagctacatgatttattttcagcagaaaattttaaaatcaacaaaattaatatctcctttttataagacaatttctatgtactctattggcagattacagacacgaatctcaaagtataggaagaaaactacataattaagaaaacattaatatgcattatgaatactaaaaattgygatgaaatattttccaaaatccttagtgatcttaccctgacaatattatagatatctccatccccatagttgcttacaggtgtgtaatataaaccattgtagaacatatccctctgaggaatgcaagggtcttccttgccatcatcaagattgaggccatggtagaaataaccatacggctctatacttggaaccatgttatacacctatgagaaaaaacatttcccaataattttaagcacttcttttaaaattacaaaattggcaaattgtctactgtaccatttattyttgttcttttctttaagagsacggccatcatatttaatccagtattttcacataagctcttcctttcraaagagcaaaccagttttgttttaggcaactgatgtcatgttcacagaatttctcagcttgggcgcaggatttaagagagaatgtaagaaagcaatgcctgactattgattaatccaaggcccattgtacasacartcaattataatgctagaatttctaagtctggagaataatcttagctgcctgattttaaatcttcttacataatcttctgaagaaaacataaaatcaacaaagagaacaagtaaggatactcatgactaatatctytaacattactacaatwcagagaataccatgatcttcaaattatttcttagtagagaaacaaacaccaaatgccaagagagcttctactgctattgcagagggaaggcttaagagactgcagagaaaaasagagcagaatggcatggagaaatgagaagaaacacacaccaagtcaactccaggtaagagaaagtctagcattgttaaaaatacaaatyatagttttcggactcaacagttcccagtacagcacacagggaaagggcttggastgaatgggcctggaagtggaagcttccaaaaaacatggctaaggggaaataatcagatcacaagaagaggtatgcagatccttggakacagggaatttaaaaaaggaaaggatgtcataggataaaataactccctccaccctcatttccatcaccaacattttaaaaataatgcattttactaaaaaaaaaaaaatagaaagggcgctcttcacctatgaacaccctgcacaaaatatcaagaactagaaaaaatcaactccatacaaagctkctgtaagagaaaataggaaatgcaaaccaaaacacttcagctaatgaaacytctccactaaagtcactaagtaaataaataagtaaacaaagaaaagccatgccaaaataatttaacatgagtgaaatattctcaagcatgtatttgaggtatttaaaaggcaccatgagtcagaaattcwattaagaaaatacagaaatggacaaaacccaagaagaaataaaatgaggctttattgaactcaggaaaactagacaaaattatatcataaataaactctaaagtacaaggacatcaagagaaaattgttcagagaaaactttaaaagcagcayagaggaaaaacaamagaacaaaactgaaaaagaatgaattaaaacaggtcacaaagtgattgaattggaaagcaggcaaggaagatccaacaaatgtacagagatttttttagaacaaaaaaaatggaaagaccaatatttacaattataattcaggggaactatctgaaaataaaagaagatttgagtttacatattgcatgactccactgtgtacctggcaaaacttctacagaataacacattcttactgaaactaagtataaaggggaaaaaacattcaaggccttcagacatagagataaagtagcccataatggaaaatgaattaaactaatgtcagcactattaaaaggcatattcaaagcaagtcaatagtaaggtagcatttcaaaaaattttaaaatgtataaaccaaagatttaatatacaaatacctgtctttcatttattaaggctttagaaaaaataattctgaatatgaaaatgtcagagaattctatacttatgtgatrtcctgaggactctagyagagaatgcactttttaaaaattkttatttatttattyctgagacaggktctcattctcttgcccaggctgaagctcagtggtatgataatggctcacagcagcctcgatctcccaggctcaagcaatcttcccgtcccagcctcctggagaatgagctttatgtaaccaaaagatgactcaggaaattagtaagacttgatgaataggagaaacaatacagaatgtaaacattatatattctgacaaaaaaggaaagatgcaacaataaaatgagagaagagggagagaaaagtggaaactagagattactgactgttgtgtaggtagcagttaagactcaaagattaaaaataactgactagattttttttttttaaatggagtctcgctctgtcgcccaggctggagtgcagtggcgcgatctcggctcactgcaagctctgcctcccaggttcaygccattctcctgcctcagtctcctgagtagctgggactacargcaccyrccaccacgcccrgctaattttttaatatttttagtagagacgcggtttcaccgtgttagcgaggatggtctcgatctcctgacctcatgatccacccgccttggcctcccaaagtcctgggattacaggcgtgagccaccgcgcccggccataactgactagatattaaggttaagcaagaaaaaatgagattaggatattaggatattataaaatatgtaaatataaaaataaccactaaaataaaaattcaagctagcctgaatactcaaagaagctttaagcaagatarcaamaaacaaacataaaagctaaagaaataaagtagctttaaatacaatacagaatcataagaaaaatagtatgatagagctgaggcctaacacatacatcatatcaatagagtgaatagactttattctcctttagaagacaaagatatgcatakttaaaacaaaacayaatgctgtacttcatacaaaaaacaagtgaagtgcatayttcaaaaggtgaaatccaaaggaaaagtaaaggaaaataataagaatgcaaaggctgcaatcctcctgttatcggaaatcgtagaagtaaggccaaaagacatcaaacaagatagagaagaatacttactgctaaaagctgcaattcataataaaggcacaacagttatgattatctatgcagaaactacagaagatgcaagaagaaacagagcactatttgtagggtattttaacacatcactcagcagaagaaggttaaataaattttacaaaataagtaagaatacaaagratcaaaataatccaacctcrtggatagaaaacaaactgataatagagactatatcttctcaacacatgagatatattcgcaaaaactcattatatatttgggcacaaaaatatacyggtggaaatattgctgrccatgaagatatagaacttgaaatttaaaagaaaactctaaaataaattcctttttatatgaaaattataaagtactccagtaagtaaattttcagtgaaagggttaatacaaacagaaattacrgaatttctgaaaaataaaaatggtgcaattgctatgtatcaggatctatgagatacttcaaaagtasaaatcatggaaaaacttataggcttaaaaacacctagcccaataaaataaattaatgaaaatgaagtaaatttctaagtgaaaaagctaaaaataacaacaaaatacagcaccagtaaggaaataatraagataraaatagaaattaatgtgatggagtagcaaaaaacctcacatcatattacatcacattaataaattaaaattatatgtttttggaaaactcggcaaaataggtaaaccacyaactaatctaacaaggaagaaaaagtagctatctgcttaggaacaaaagaaaaacaacttcttccatgactcagttttcagcctcattttttgtccttttagcatcgtgaattggggtccggagttgtttgtatttttctttcacaatagactgatgtatgtaacctagtctcaaatgattcagaaaaaactgaaatgscataaactctgtgtgtgtgtgtgtgtgtgtgtgtgtatgtatgtgtgtgtgtgtagggktggagagagtgagaaagagaaaacaagtayggygaaatgttcacaaactggtgaatcaggccaagggtctacgggagttctctgtgtaattcttgcacttttaaaaattatttaaaactaaaaactaagcttacatagataatacaaaaaataacayaaacttatagaatataaattggaattcactcatttatagaacttcacttgatttatactattaatatagctatcaataataaacaagggcaayctcttttggctctgatatattctgagacccctgaawaatgcctctagaattttytttttgaggtcccttgatggtcttttcttgaggcagttttcctaagatattgccacctccaactgtagaaagaatgagcagaagctatttactctgaatccatgaaactctcaagggaaaaaaaaggwgtgtgtgtgtgtgtacatatataaacatatatatgtacacacacacacacacacacacatatatatatacatattccttttttttctttgagacagggtctcgctctgtcacccaggatggagtgtagtggcacgatcttggttcactgcaacctctgcccccgccagggctcaagtgatcctcccatgtcaatctcccaagtttctgagatcacaggtgcacaccactgtgccctgctcattttttatattttygggggagacagagtctcatcatgttgtgcaggctggtctcgacctcgtgagcacaaacgatctgcccgccttggcctcccaaagtgctgggattacaggcgtgagcacagcacatggccatattccatatttatagataaatttatcctttatttgttgatgycccctcagattctgaaagcttctaactaaaagtatttttgctcyctgtaatagaaaacttaaatgtatttatgttttgcattgagaaaaatgttttatataatgatcyatagttattcaatattattactgaattctataattttatacttaaaactggacttactayagaatgttgaaagcaaaatacaaaactattttttggtgagatctcaagtttgtaaaatatatatgccttcagaaaagagacttgaaaaattacagcaaaactataaagatgcctaagtgttaggactataaatgattttaaagatttccttctttatgtctttgtatactttgcacaaagtacacaatttaaattagatttaaatatgatcataaatttcaatagttatttatatgtaattgtgttagaaataaacggaaaatatccaacaattgttaagcgaaataaattggatgtgaacttctggaattccaggtctggaaatgtttaagaaaatacaatatccatttatagataataactttacactgaatccaagcatatccttgaacatagagatttcattttattccaagtttccacwtctgtgattacacctatgatttttaaaaatcacagttgtaaaattcctaaactgttataattatctatcaaattctgtattgttataagcatgctcttaggatagccaagaaaaatacgtatataatccacgaaggaacaaaggaagaaaacattcaatattttcaacatgttcaagacatcatctgaaggataagacttctggtagtccagagaaacatgaaaaacgaggaagtcagagagcttacactttcagctgacagctgttgttcagatttcagtagaaggacgttcccatccacagccccgagggcacagaataagacaggcgccgcttgaagatagagactagcattggaaccaggtaagccctgctcgttagagaactttatgttaacctaaagtagagaaaaaaaagagatgagagtagagaccattttatgtaaagatgatctgaatacatttaatctctcctgaataaatccttatagatttctatackgtatttcctttgcccactctcaccctcagctttctttgcaggagacccccttcaccacgtgctgccgtctcaggattggcactgctgccaaggatcatgcattgtgtttggtgattctcacatcccctaataattcaattatgccagcactgagtgtaagtttcccacgtgaaggtgatagcagtcaggcgagaagacagcagggagcaaactgttcccacttctcaggccagaaataggagaaacatcaccttgtgtttaaagcacttgtcaacctggaatctgacactgtcagccacaatttccccactggggtgaagggtgtagacaaacaggacggctgcaggagccagatcagcactgatgctgagtgggaacgagaagtttccattccaggctgtgtaaataggagacgaagagatacgatgctgaaagtttcctgaatcactggtacacttagataaaagagaatagctcatggacagaaagagtaaattgggccctgttttcaagacaaataaatcaaataataggaagtacatacacaaataaagaagactgcataatttagataataacaatactgggattttgtacaccacttttctttttttattttttatttattattattattattctttaagttttagggtacatgtgcacaatgtgcaggttagttacatatgtatacatgtgccatgctggtacgctgcacccactaactcatcatcgagcattaggtatatctcccaatgctatccctcccccatccccccaccccacaacagtccccagagtgtgatgttccccttcctgtgtccatgtgttctcaccattcaattcccacctatgagtgagaatatgcggttgtacacctcttttctaatgtactcaatgatctgacaataaaagaaacaggtagaactctccttcgtcaagacatttagtagcttccctcaggctgtgctaactattaccttcatccacaaattgaaataagtgctcgttctaacttcttttcactatataatatatacacatacatatatacacacatatatatacacacacatatatgtttgactaaatatattttcttaatatatataattcccatatatataatgtctatatatccttaacaagaaaaaatgaagttagagcacatattttaaaatgaatacattatgtatacctttgtttctgatttccttttgtccactgagtaagatagctccttttaccatcatctgtgtggaacaaagaaaacataacatgcaatatattatctgatgtcatcatattctcatattgagattaggtaattcattacttaatggtaattctgttccataagatagggtagcttccacaagcaaatattaaaaatagactttgcgtaagttggaaaagagcagagaaagtgactaaaactgattgagattctatcatgtactggaaactttgtgaactatgtgcaatgcactgtgcaaagtggcacataaagctctgaaattgtcaaggctgtccggtttcaaatacgccttcacctgctcattaactttgtgacttaaaacatgatgttttacctgtttgcctctgttccattatctgtaaaatggagatatctataaggctaattaaatgagttaacacatatacaatctttataacagtgcctgacacagaacacttaccctaagaggtaagtcttataatctccaattacactgtacacctgaggaagccaagggttaaagagttcaaacaatccgtccaagatgcactaacttgcatgctaactaggagagggtgggggattcaagttaatgtcttaatttccaggtctgtgtcttatcactcttcaatagcccttagagcagaaggccccagtccccaggctgtgtaccggcaggtacctatccatggcctgtcaggtactaggccacacagcaggaggtgagcagtgcggtgagcaagcattaccacctgagctcctgtcagatcagcagtggtattagattctcataggagcacaagccctggtgtgaactgcacatgtgagggatctaggttgtgcgctccttatgagaatctaatgcctaaaaatctgtcactgtctcccatcaccaacagataggaccatctagctgcaggaaaacaagcacagggttcttactgattccacattatggtgagtatgtaataataatagaaataaagtgaacaataaatgtaatatgcttgaatcatcctgaagccatcccaccatccccaccccatctgtggaaaaattgtcttccatgaagcmagtccctggtgccacaaaggttgggggctcctccttagaaagacaaaatggacagaaccaagagaataaagtccttttactgcttatcaamataagctttccaccttactttctggcatctgcccaatattttactattacaaagtgtcataaatacttgatatgagttacatttgaatgcttaaacaagtggactctgaacagcaagttcttcaaccttagggaaactttaattgccttagatcgttctatgtgtttgtttgttgttaatggatcgaacagtattcaccagcaaagtgagaaggctgcccttactctggtcaccgtggcatgactgatgcatgmtttctaagctgtgctgggctaagcagacgtgcaattgaacaggattccaggaacccactgactgagacttaccaaatagaakaactttacattggaatcatcctcatatgcttcactgtttagggagtaatgcacagtaacaaccttctggtgattacattcaagctgctttggttctggaacaatcttcaggaagctgttsgttcgggagtaaaagcgtgagactaagaagtgagcatccaagtactgaggcgtcaaccagctgggaagatagcagctctyaggtcgaacatatgtggcctgagatgacaaaagaaagtgaagggtcttagtatcatgacatccgaagacagttgttactgagaatggaggcttctcaactctccagagtagggaggaatctcagcttgtggctgacgttttaatgttaagttattggaatcaaaataataatagcacctgctctttgtatacaaaacgtgaccatgaaagaytgtgtaaatatttcattagactgatggtgaattgttatgttttttacactttaattgaagccacagaattgggtttcagttctgtttctttcagctacatgtgaacactgacaaattatttaactgcaaaattctgtttaagcagcrgaaaataaacagaaagtataggatctcccctatctatgcatgaaatgatctgaggaagaaagtcaaatcatcctcatgagctacttcttgtttcctaraggaaaatattagttgttagcaaatttataacaatcgtgatagacttttagcttcccatcctcttgaacaagtattctcatgtattatttagtgaacaagcaaatttataaaataagttacattttaaattttctttaaaatakattctgtatacaagctatcttttgagatattcctaatgtttaacatttctgatatccaaatcctctgtgggatgtctaatggtcttcttctgttctttgatgtcttacttttaggttgaactctggatcaaatatgtctgaagtgtcaatggaaaattgagcttcgccattctcatccgtagtgtaatttcctataaattcatcattgagctccagttgcaacaacttgttcaccataggtacattattgggatccgaaaatttaagctgtacgagaaaagaataattaacatgacttaaaacacaaaatgtttacatttttacagagaaatagttttctactcataaatgtgatccctagtcattttcctaaattccaacagacagaaagatgctctattaaatacatagatatataatataaagtatggaaaaaatgatactgttatctattgcttctttcaatctaggacactttctagcacctcagacatagtagtgcttaaaatgtattacaaaagtaggaaaaaagtgaccagaaattttcaaagggcaatctatgatccaagaaaatgaaatggaagcatgtattctttagtcaaacctacagttccaaaataagaaatccctcttctgtagaaagtatccatgttctcaaagtttacagttccaagcaattgagtgataaaaactgaggtcttctcactgatctgcatacctgtaaggaatgatgaacacagcagagtgaaaatatctaagttaccatccacagcaatataaatgtgaccagcttgcccagtgtgaatagcatcatgatattgatcaagtatgcttatatagagcactttacaatggcataatcacaaactcctttttaaataacaagaaataattagtagttaaatctgattttcccactccaaattaaataattaatctctttctcccttctttctggtttttttttttttttttttttttgagactgagtcttggtgtgtcacccaggctggaggctggagtgcaatagtgcgatctcagctcactgcaacctccgcctcctgggttcaagcgattctcctgcctcagcctcccgagtagctgggattacaggcattcaccatcatgcccggctaattttttgtatttttgtagagacagggtttcaccatgctggccaggctgattttgaactcctgacctcaggtgatccacctgccttggcctcccaaagtgctgggattacaggcgtgagccaccgtgcccggcctcttctttcattcttttaacaaatacttattgaacactcactttgtgcaatcttgtaaatttttcagtaataatttttgcacttgcaactattcccagttgtattaaattagaaataatctgaattttgtacttagtgctaactcaacaagcttctcccagtaagttgccatacatatatccccaggtcgtccaaaaaatacagtaattacctgtcccagattctgtaacaattacagcgacatgaaatgtcatgaacaatcccgaacggtagagttggaagacttttgtatttacaatttgagaaacacaaccattttccaactgaaaaataaagagaaggtataattaaaatgttagagatccaagaggtttttttaagtgtcttttaaaatatggtttttgcacaaatatattaacatccccaccccgtgccacggctctacctcataaacttgttgaaatggccaaagaattaaaggaggagtaggaggaggcgaatatttacatcagcattttaaataagggaaggaggtaatctgtattttacagatttcaaggaaattctcctggaaacattgtagatgagaaaagattaaaggatggaaatgaagctgaatggtattgtgaaaggaaagtaaatctcaggagcccaacatccctaagctaaagggaaagggcaagctgggaacagctgggcaaatctgtctcccattttattcccaaataaggtagctacaaagataaaaactacatacctccctcacaatttgcccacaaggaaattctttgtgggcctcaagaacttttccttaaaacagttctttggaaattcaccctggcaatataaattcatagcttatctttacaggcgtgggacaaaagacagactcagtcatccctctgcttacctgagacaaatacatatctgatttatctgattgcttcctctgcctaatagtttatgtaaaaatgcagatttactgagccacactaaggcaggagtgactattcctctatcctcctctcacatgtaatttgtgtattcagtgaaaggctgatcaaagacaaagacttattcttttttttttttttttttttttttagatagagccttgctctgtcactcgggctggggtgaaatagcccaatcttgactcactgcaacctccgcctcccaggttcaagcgattctcctgcatcagtctctcaagtagctgggattacagacacctgccaccacgcctggctaatttttgtatttttagtagagatggggtttctccacgttggtcaggctggtctcgatctcctgacctcacgtgatctgcccgcctcggcctcccaaagtgctgggattacagctgtgaatcactgcacctggcctcaaagacttcttctttatgcaactgtttgtctcttatctacctatgacctggaaacccccttagtttggattgtcctgcctttctggaccgaaccaatgtacatcttacacatatttgttgatgtctcacatctccctgaaatgtataaaagcaagctgtagcccaaccaccttgggcacatgttggtaggacctctggaggctgtcataggtacatccttcaccttggcaacataagctttgcaaattgattgacatctgtctcagatacttttggttcacagtgttttaagaggaagaaattctaatcatctagaaaggcactaaaacagatggaacagaagcgctcagcacatgtgtaacaacaaaacaaacactttttaaggtatattgcttatttaaaataacaaaaaatctatagttaatctatcatcagtaataataatyagagaaatataaatttagttatattttayaacacagtgtttattccagatttaaaatgttataaggatatatyagtttatttgatactcaaaactattacatgagctaggtactgttattatcttactatatagatgaagaaactaaactaggtccatcatgtaacctgtccaagatctcacagctaagagacggtggtgctgaggagctgctctggctccagagtatgtgcttctctatcttaaattaacagccattacatcaacaacaaaagcaattttattttgtctaatgataatatagtcaaattaaaatgaaatcatagaaagtgatcagaagaaccttaattatttcgaaaataagagaaaagccttttttcaggaatccttgaaacaaagagaatacataaagtaaaccaataagaatccagatattagagtaatgaaaaaatacttcgcatcaaagtcaatggtattcagctgcagttcagaagaaatgtaaaacagtgaatgtgcttattactaaaagaaacagctaatatattttttaaaccccaacaaaatcaactacaaatattagraaaaagaattaataagatgaaagagaaaataaattatttaggaacacaaaataataaaagaaagaaaatagtaaaaataagaaccaataaaatagacgaaactttcgtgggcatgatttaggacaaagagtgagagagaacaaaattgtgagataggtgctaacacaacacagcccacatctggaagaaaaattcccattttagaacatcattggaagtgaactttatgtctattagaaaattgtaaacaatcttaagagcatacttagatagccacatgtacaacacaggggccagtgagattttttttctaaggctggaaacccaggaacataaggaaggtgggtatgtcaaaaatatgacaaagtaaatgagttgcctatttaaataayrggcttgaaaaaaaatgcttgkaggatggaaggcagtacttacactgaaagtttccatttcacatgaacagaaaaacatgggtaattaagagttctcaaatccaaattgataacaaaaatatgaaaagttgctcaaactaaatmgaaattagatagcacaagttaaaacaagctaaatttgtgtctatcaaaatgacaaaaacttttaaaacttctaaatatattgctgaaagtaatttggaaaatatagtattctcatgtacttctgacaggaatttgaatgcctaaaaacttttaggagagcaatatgctaatatttattaaaattaaaattatctgtctatgaacattatctatatttcctttgactcaggaaactcactctaagaaatttatttcaagtaaataaagcctctcatatataaagatagttccaccggacagattttttttttttttctttttctgaggcaggtcttgctctgttgcccagsctygagtacagtggtgcgaacacamttcactgcagccttgacctcctgggctccagtgattctyttgcctcagcctccctgtagctggraccacagatgtgcaccactgtgcctggctaatttttgtagagaaggggctcactatgttgcccaggctggtttcgatctcctggagtcaaatgatcctcccgcctcggccttccaacatgctcagattagaggtgtgagccactgctcctagcctctaccagattgtttatgggtatttttttcacatgggggaaaaaaataaaccatttgctgagggaacacccatcattgtgtaaaacagttgactgaactctatcagaatgtactgctgacatggaraaattccaccctagttttctttgcctgcatttcctatgtaaaggtaggattctgcttgtctttgtcaattattgatatttacctagaggatgttcactaaatttgatgagtaactttaggacaattggacttaaaatatgaactatgtggcrtacacaagcttcactttggggagtcaaaagacaatttcaaagagataggaagagytgttcacttaaggttaggatgctgcagatagagcaaatgatgacttcacatatgaactgcaagtctaaagtaayatagtgggggtactctgaattgcagttgattgmaagtaagctgtttccactaaaaaaaaatccaggtggcatggagagtaatatcacagactcatttaaaggatgattaacgattctccaaagaaaaatcaggaaggcyacctaggcgatatayaaaacaacaaagcccacgatacctttcatattctaaaaatcccatgaatctataggtggagaacaatttacatggtctatggaataaaaaactgctttaagcactgtattttcttctctttcttcactttatttagctgcaaactccattatcaataaaatgaaaatagtattgttaagytccccttataaatgaaatcaaagaaagaataagaatgaaaaatgagtgagaactttttttggagtaaagatcatggtctgtacctgtgcaataaattgctcacatatttcattktcatttttctcacaattgcttgaagaaaaatactctctgcacacccggatttgggtttccccttgcacaggttggccaaaggtgtacctaatgggggaaggtgtagttatgattacagataagcaatatcatagcaatattttatgatcttcttcagaaattatataggaagtctctaaactgtgagtaacccagtctaaccaaattgaattaggaattctccctattggtgagggtttaggttccccacagaattcaggttaaactgggcatttcatctcaggaggatttggctgcctttaaaaaattgaattcagggtaaggcagaatctaaaataatctaaaatctcattgaatatgatttaatgcttaaattgagttttttaaaaatatattttaatctgatagaaacatcataacattgcagcactttcccttttatcagaaaaatatatatgtatataaaacttggatgattcaggatcctgaaacatttccagatcaacattttaaacacgaatttttatttaccactcactaaatataaaggctatggggctggcatgaactggttatgctttgaccaaaaatataaccagtttgagtatctcattttctcctaaaacacaaaactacaacacaagatttgtaaaggttcaaccaaaggcaaatccagtcaattggagttttttgttttgttaatagacaaccaaatgtaaaactagcatataataaaagtgaatattattttcacagattatattacttttttctaaytgttggacactgatatatatcatttatttttcccagtgaccctgatttgtaaaatgaggtcaagtaacttctccacattgtaattgatgaaactaaaattcgaactcagatctgcctcactccatagcctgtgcccttttctttccactcacctttttctctttctatttaaaaattcctaacacttttgagattctgagtcaawtcataccaataaaatcatgtgtcaggtttcatgattatataaaggccagacttagatctggccacacatattatacctgaacatttcttcttatttctacttaatgtyttttatttatamaataaaagtcttattgtattatctgtaagctaacatatgcctataagacatgtagcttaaattttaaaaacaggacagaataatcccttcgtgatttgaaaagctttcagtgaatgctaatgcagtgtattaaaatctcttcgtctgtaggtaaattttcttccctcttaaaagcctaagtcatctctgactttgtttgctaaaataatccaatttttttcttgttttctctagccattccaagctaaatcccagaaaaggctaaagaaacacagacacagtatcatacaatttgagacacagtatacaactgacgtgaaccttctagaaacagtgctctcacaatctgcccagaaataactttgtagcaagcacagctccagtctagctgcctggcctcctggcaggatattattattgctgatactgatttactccttaatataactctatccaaaatacaacatcaaagaaatttcaagaaatcaggatcatggattgtaacctgacatactgctaaggaactaccagttccatgttagcatgaggtttgcaagtattttccaaaggccatgtttgagaaacatttttgttcttccaatgtgttgtgggttttgtttttagcatactatcgtgcagataaataaatgagatgttaatgccactgaaagctctggctttgcgtttggcttttctagtgaaacctgtttagkattctggatttcttccarcttraatttatcacctcatcatttttaacatcagtgatctacacagtctctcatctattacgtatattaaattctggtattttcaactactcttcattaaaacttagaaaaaaatttataatcatttcctaaagtcaaaagaagatttgaaatgctactgaaaaaaaaaaaagaaggctgaaaactggtttgcaagattctctggggcatcaaaggcatcttaagaaccacscttgcacgttcattagacagccctttaatcaatgtatctttaatagactgctggaaatactcaaaggcaagtaattttcatgtcataaattaaacaaagtgcttaacaaatatggcaaatattaatattgttaactgtttttataaagtatatgacagttattgattaggagagtagctttgaagctgaaaaacctaggtctaaatcctagttctgccatcaacaagctccattactgttgataagttattttaattctctgtgtcttattatctttctttataaaatacagatgacaatagctcctatctcatagcactgtggtaatgatatatgcagagcttaacaaactagttgacattcaaaaaacatttattttattttttattttattattttttttctgagacagagtttcactcagtcgcccaggctggagtgaggtggcatgatcttggctcactgcaacctccacttcctgggtgcaagcaattctcctgcctcagcctccccagtagctgagattactggtgcctgccaccatgcccgtctaattttttgtatttttagtagagacggggtttcgctatgttggccaggctggtctcgatctcctgacctcggatgatccctcccccaccttggcctcccaaaatgctggcattacaggtgtgagccaccgtgcctggccaattgtttataaattattattagaaatttgagaaaaggcagtaaaaaagaaaaaaaaattaaaaataattttccaaaaacaaaatacaaatttctgaaatcgtgtagatttttttacattaagagaattcaaataattcagattaacttgataagatgctttatcttcactttgccatttcaatagctcatattctaattttaatgaaaatatgccatgatagtaaagattcaatgagaatttcacaccagctgctagaatcctacactggcacaacatgtttagtgaggagtatggcaatcagaagactaaaagaatgttacatattttgtcttggtaattccttttctggaaatctttcttaagtaaacaatttttcattcaaaagctacctattatatgttatacacaaagacatatactgcaaaattattaattaccaggaaaacaaaatgaaacagccaacatattatataataaaataattaaattgggtatagtcacataaaaatatgtgcagcagaaaattggaattcatgaaaagattggcataataygwaggcatgttttcttaattattataaatagaaaagtatgattgcagtcatggaaaatattcattaaaattagaggamacttacaatgttagtgacattacaatgttaatggcagttggtcaaattaataataggtaatgtcttgtgttyttctctatatttttcaaattttctacartgaggattcattgcttctctaayaacaytaatgtaagcatataaataattaaagtttyatggttaatctcacttctcattctctctgagctttgtgttttcttgtgaaggtaaatctctgaataaatactcacttagcacatacatccacttggaattcatcatctgaaatagttactgtttgtggtgcattgaccrtaacttcaaacttgggcagcactggaaacgaagagaaatatacgttagcctscacaatcacaggcaagcaaaccttattgcagtcatatagyttactatgattccttgtaccctccatctgtatgagctatgtatcatttgccccaaattgtgtggcaccattctacatggtggtgtctcactaatgattaattcttcctctttcttttcttttccctatcytcagaatttcacattttgtttctttttgtttgtttgtttgagacggagtttcactctgttgcccaggctggagtgcagtggtgcaatcttggctcactgcaacctctgcctacrgggttcaagccattctcctgcctcagcctcccgagtagctgggattacaggcatgcacgaccacgctgggctaatttttgtatttttagtagagactgggtttcaccatgttggtgaggctggtctcsaactcctgacctcatgatccactcrcctcagtctctcaaagtgctgggattacaggcgtgagccaccacaccyggcctcacattttctttctattgcaatctcttagatctctcctagaagactgtggggattctagaaaaaatgtatattttctaggggaaaaagaaggcaggaatcagaataaggatactggggaaggagagaggagcagcaaagtgctgatgacraagccaaccaggtcaaggaagggagacaaagaaaaccagttctagcttcacctactcctgcctaagtctaacayaaatgttgtgttggtccatcctttaaactcttcatctacayaggacagctacaaatagcaactggttaccatatcttttaacagcaaattggtgtgtcactgtctyccttgagtttcttttcacaacaatccagtaatctccaaacattggttctgaaatcagttggaacgagagttgggtaatatttcggaaagaagtcacattttgccwttgaaaaatccrattgttttgaggatcctagaaaataatgaaaaaaatataaacaatcagaatttgtatgagagtattaccctttgctgccatatttcggatagtttcggatagtttcacaagggttattttaggccaatattttctcttatgaaacaaacaagtagcttttggtagagcctgtgagggcttaagaaccctaatgtctataaatcttagaggattatacactatgctttggtcatamaaacttgtactgcctttattcttttttctttttttaaagtattgtaattgtacatacttaaaggatacaattggcggggcacagtggctcacacctgtaatcctagcactttgggatgccaaggtgggcagatcactagagccmaggagttcaagaycagcttgggtaatattgtgaaaccccatctctactaaaaatacaaaaattagttgggtatggtggcgtgtgcctctgtaatcccagctacttgggaggctgaggcaggagaatcgcttcaacgtgggaggtgaaggttgcagtgaaccgagatcataccactgcactccagcctgggtgacagagtgagactttgtctcaaaaataaaaaaaaaagtgggggggtacaatttgatgtttcaatacacacacacacacacagacacacacacatatctatatatktagtataatgatcatattggggcagtgttaccagtacttcatycatttatcttttttttttatggtgaagacattcaaaaacctctcatctagctattttgtaatttgctaaatcttactgtaaactattgtcakcctactgtgcaatagaacaccagaactcattccttcttcattcttttcarattaaataaaattttaaaacactygtagagtgtcagatgtgttccaaggactgatccaartgctcaaggcacaaaaatgtatatgacatgttcacagcccatattagcttaaaattttaagccactgtgctccttgttattatagtcatataattttcttgcattatggctgcaattcacattctgtaatcagggtatagatgtctaagtaaagtgttggcttaataattgttgttctaatcaaattgaattacacgttaacaaaacttacttaaattttccttgtatatttaattctatctcttcccaggccaagtcaaaaaaaatatgaaccyttggaasaattacatctagaagtgaccagtcctagtctaaatatttaaatacataacatgaggaattcaggccaaaagtttattctgataggtctattttttgatgtactaataaaactggccatctctgctatagttttgctaacttgttgcagaagtaatctcaagaagaaaayagccctattagattatgtttaggatggatagttcaatatatattttgccaaaatgttatattgagtttacacaaataaacacacacaagctgtcataataagttcatttagcaactgttttaggrtagatttttattctggaagatccataatgaattatattttatatgaagacagggctaccttttgcgtcaatattttgataktgaagagtgctggtacatcaataaagtacttgtatagtaaacaaattaaagatgttttgtgaactagctaggccttgaagactcacagggyttggtgtgtaatactgtcattcttagagataattagctccaggttgttctttctgctggaattgtgaattgcaaatccattcttatcagagtgaaatcagaacttcaaccctaatcaaaattgattggatgaattattgagtgttacaaaagtkatgcaatgaagggccctcatatttttgacattcatttttattagatccttcttatytggagattaggtatgtgagaagctcggagaaataatcttagaagagccaagcagaatttttatatctaaatccatgttacttacatagaatatattgttctttaaatataaaaatctataaatctgtacaagaccaatcgatacaagtaaaaaaaaatgtctgatcctgcttgaagtaaattatcaaagccatctacgttgagagatgaaatgtattacgtctctcctgctaacttgaggagtaaaggaatttaytaaaaagttactaggatgtttttattccttttctttttttttcttgcagtgaagcctgtagatccttaagattctttaccagttgtgtggtcttaatttcacaaattgaggaatctgatccatagatggttccacttgaacgtggtgggagggtaacattctcyttccatgaaatgtaaagactgcattgtgggacatggaggggctccatgagatccatttagttgcattcatcctcctgtccccaaagtatatcagtaaatgtaytgtttcttgacagtttggctgtgttatcccagasgmctggatgtgggaatctccaaatggccagataatactctcagcttccaattcagtgaaactattcttaagcatgttaatgaaaatatacttctttcctggatcctaaaaggtctaaatgaaaacaactcctattcytraggatggaaaacaagtattctgcaaaagccactaccaatccgtaccttggttcccagacatatctctagaagagacagaaacaagccctttaatataatttcattcctcaacttccttggaattagtcccttaatgtgtcttgttctaaatccctgatcatcttgccacacatttgttaaggcttataaaagagtgtacatctttacctcaggccatttgtagacttgtcatatactttggtaatttcccaacatatgcgtttcacttccagtaaagaagttagaagactccattcccagattaccttgaatccagggggcaggtaaatgacaggctcgaccartgagatgctctgttctgagactgggaatcagaagggagtgaaatggggaggccatggaagagtttattttcagggaactgtgagtataatggcaacttctagttcattkaggataagataggcagaaccttttcacatccactccaatgtgtttattccacacacraggagccacagtgggaattctgatcattgctagacttgtcaattatacctacacatttggaaaatgaataaataaccagaagatggatcyggtctctgttagwcctacaatgaagacaatttggccccaaattctggttattcctgatagtcataatctttgcctctcatctcagatgttattagtgaggtaatattcagtattttatagaatatttagatatttatctttccaggagctcatgtgctttggtaatgaggcagaatrtctttgagaaagatagaagtgagaccttagggatgggtgtctgcctaactgaagtggactccagtgaaaattatataaatatcaaggcatgaaaattcagcactccctatcatgcactggtgaaaaagataatcaaataatctcctgttcaccattgacaaagtgcctattgacagcaagcatttggggaccacaaatttccactgctatagaacgataccaggctgattacttctaagagttctgagaaaattaaagaaaagaaaaacaagctaggaactttaaattagcccttaccatccggagttctgtaacagaattatctctaagtctccaatacagctactgaatgtaatgaattaatattacatttattgatgcataaatagtaccattctctcctatatatcctgaatggtactatttatgcatcaaatggtctctcgaaacattctctgtggagttaaacaataaagcaattttcttatataacagttgagaaaggttgctctaaatttttggttgaagatatacattgaaaagtgagtactttcaatttttatgttaaaactctcatttattgcagagcagttctgtaatcaaaatgcctcattattgtatgtgcttagatagaggctgataatttacctgtgagggattttttaaaaaattactgactgtggaggggaggagccaagatggccgaataggaacagctctggtctacagctcccagcttgagcgacacagaagacggtgatttctgcctttccatctgaggtaccgggttcatctcactagggagtgccagacagtgggcgcaggtcagtgggtgcgcgcaccgtgcgccagccaaagcagggcgaggcattgcctcacttgggaagcgcaaggggtcagggagttccctttccgagtcgaagaaaggggtgacggagggcacctggaaaatcgggtcactcccacccgaatactgggcttttccgacgggcttaaaaaacggtgcaccacgagattatatcccgcacctggcttggagggtcctaccccacggagtctcgctggttgctagcacagcagtctgagatcaaactgcaaggcggcagcgaggctgggggaggggcgcccaccattgcccaggcttgcttaggtaaacaaagcagccgggaagctcgaactgggtggaacccaccacagctcaaggaggcctgcctgcctctgtaggctccacctctgggagcagggcacagacaaacaaaaagacagcagtaacctctgcagacttaaatgtccctgtctgacagctttgaagagagcagtggttctcccagcatgcagctggagatctgagaacgggcagactgcctcctcaagtgggtccctgacccctgacccttgagcagcttaactgggaggcaccccccagcaggggcacactgacacctcacacgtcccagtactccaacagacctgcagctgagggtcctgtctgttagaaggaaaactaacaaacagaaaggacatccacaccaaaaacccatctgtacatcaccatcatcaaagaccaaaagtagataaaaccacaaagatggggaaaaaaacagaacagaaaaactggaaactctaaaaagcagagcgcctctcctcctccaaaggaacgcagttcctcaccagcaacggaacaaagctggatggagaatgactctgacgaactgagagaagaaggcttcagacgatcaaattactctgagctacaggaggacattcaaaccaaaggcaaagaagttgaaaactttgaagaaaatttagaagaatgcataactagaataaccaatacagagaagtgcttaaaggagctgatggagctgaaaaccaaggctcgagatctatgtgaagaacgcagaagcctcaggagccgatgcgatcaactggaagacagggtatcagagatggaagatgaaatgaatgaaatgaagtgagaagggaagtttagagaaaaaagaataaaaagaaatgagcaaagcctccaagaaatatgggactatgtgaaaagaccaaatctacgtctgattggtgtacctgaaagtgatgcggagaatggaaccaagttggaaaacactctgcaggatattatccaggagaacttccccaatctagcaaggcaggccaatgttcagattcaggaaatacagagaatgccacaaagatactcctcaagaagagcaactccaagacacataattgtcagattcaccaaagttgaaatgaaggaaaaaatgttaagggcagccagagagaaaggtcgggttaccctcaaagggaagcccagcagactaacagcggatctctcggcagaaaccctacaagccagaagagagtgggggccaatattcaacattcttaaagacaagaatattcaacccagaatttcatatccagccaaactaagcttcataagcaaaggagaaataaaatactttacagacaagcaaatgctgagagattttgtcaccaccaggcctgccctaaaagagctcctgaaggaagcgctaaacatggaaaggaacaactggtaccagccgctgcaaaatcatgccaaaatgtacagaccatcaagactaggaagaaactgcatcaactaacgagtaaaataaccagctaacatcataatgacaggatcaaattcacacataacaatattaactttaaatgtaaatggactaaatgttccaattaaaagacacagactggcaaattggataaagagtcaagacccatcagtgtgctgtattcaggaaacccatctcacgtgcagagacacacataggctcaaaataaaaggatggaggaagatctaccaagcaaatggaaaacaaaaaaaggcaggggttgcaatcctagtctctgataaaacagactttaaaccaacaaagatcaaaagagacaaagaaggccattacataatggtaaagggatcaattcaacaagaggagctaactatcctaaatatatatgcacccaatacaggagcacccagattcataaagcaagtcctgagtgacctacaaagagacttagactcccacacaataataatgggagactttaacaccccactgtcaacattagacagatcaacgagacagaaagtcaacaaggatacccaggaattgaactcagctctgcacggacctaatagacatctacagaactctccaccccaaatcaacagaatatacatttttttcagcaccacaccacacctattccaaaattgaccacatacttggaagtaaagctctcctcagcaaatgtaaaagaacagaaattataacaaactatctctcagaccacagtgcaatcaaactagaactcaggattaagaacctcactcaaaaccgctcaactacatggaaactgaacaacctgctcctgaatgactactgggtacataacgaaatgaaggcagaaataaagatgttctttgaaaccaacgagaacaaagacacaacataccagaatctctgggacacattcaaagcagtgtgtagagggaaatttaaagcactaaatgcccacaagagaaagcaggaaagatccaaaattgataccctaacatcacaattaaaagaactagaaaagcaagagcaaacacattcaaaagctagcagaaagcaagaaataactaaaatcagagcagcactgaaggaaatagagacacaaaaaacccttcaaaaaattaacgaatccaggagctggttttttgaaaggatcaacaaaattgatagaccgctagcaagactaataaagaaaaaaagagagaagaatcaaatagacgcaataaaaaatgataaaggggatatcaccaccgatcccacagaaatacaaactaccatcagagaatactacaaacacctctacgcaaataaactagaaaatctagaagaaatggataaattccttgacatatacactctcccaagactaaaccaggaagaagttgaatctctgaatagaccaataacaggagctgaaattgtggcaataatcaatagcttaccaacgaaaaagagtccaggaccagatggattcacagccgaattctaccagaggtacaaggaggaactggtaccattacttctgaaactattctaatcaatagaaaaagagggaatcctccctaactcattttatgaggccagcatcatcctgataccaaagccgggcagagacacaaccaaaaaagtgaattttagaccaacatccttgatgaacattgatgcaaaaatcctctataaaatactggcaaaccgaatccagcagcacatcaaaaagcttatccaccatgatcaagtgggcttcatccctgggatgcaaggctggttcaatatatgcaaatcaataaatgtaatccagcatataaacagaatcaaagacaaaaaccacatgattatctcaatagatgcagaaaaggcctttgacaaaattcaacaacccttcatgctaaaaactctcaataaatcaggtattgatgggacgtatctcaaaatcataagagctatctatgcaaacccacagccaatatcatactgaatgggcaaaaactggaagcattccctttgaaaactggcacaagacagggatgccctctctcaccactcctattcaacatagtgttggaagttctggccagggcaattaggcaggagaaggaaataaagggtattcaattaggaaaagaggaagtcaaattgtccctgtttgcagacgatatgattgtttatctagaaaaccccattgtctcagcccaaaatctccttaagctgataagcaacttcagcaaagtctcaggatacaaaatcaatgtacaaaaatcacaagcattcttatacaccaacaacagacaaacagccaaatcatgagtgaactcccattcacaattgcttcaaagagaataaaatacctaggaatccaacttagaagggatgtgaaggacctcttcaaggagaactacaaaccactgctcaaggaaataaaagaggatacaaacaaatggaagaacattccatgctcatgggtaggaagaatcaatatcgtgaaaatggccatactgcccaaggtaatttacagattcaatgacatccccatcaagctaccaatgcctttcttcacagaattggaaaaaactactttaaagttcatatggatccaaaaaagagcctgcatcaccaagtcaatcctgagccaaaagaacaaagctggaggcatcacactacctgacttcaaactatactacaaggctacagtaaccaaaacagcatggtactggtaccaaaacagagatgtagatcaatggaacagaacagagccctcagagataacgccgcatacctacaactatctgatctttgacaaacctgagaaaaacaagcaatgaggaaaggattccctatttaataaatggtgctgggaaaactggctagccatatgtagaaagctgaaactggatcccttccttacaccttatacaaaaattaattcaagatggattaaagacttaaacgttagacctaaaaccataaaaaccctagaagaaaacctaggcattaccattcaggacataggcatgggcaaggacttcatgtctaaaacaccaaaagcaatagcaacaaaagccaaaattgacaaaggggacctaattaaactaaagagcttctgcacagcaaaagaagctaccatcagagtgaacaggcaacctacaaaatgggagaaaattatcacaacctactcatctgacaaagggctaatatccagaatctacaatgaactcaaacaaatttacaagaaaaaaacaaacaacccaatcaaaaagtgcgcaaaggacatgaacagacacttctcaaaagaagacatttatgcagccaaaaaacacatgaaaaaatgctcaccatcactggccatcagagaaatgcaaatcaaaaccacaatgagataccatctcacaccagttagaatggcaatcattaaaaagtcaggaaacaacaggtgctggagaggatgtggagaaataggaatacttttacactgctggtgggactgtaaactagttcaaccattgtggaagtcagtgtggcaattcctcagggatctagaactagaaataccatttgacccagccatcccattactgggtatatacccaaaggactataaatcatgctgctataaagacacatgcacacgtatgtttattgcggcattattcacaatagcaaagacttggaaccaagccaaatgtccaacaatgatagactggattaagaaaatgtggcacatatacaccatggaatactatgcagccataaaaaatgatgagttcatgtcctttgtagggacatggatgaaattggaaatcatcattctcagtaaactatcacaataacaaaaaaccaaacactgcatattctcactcgtaggtgggaactgaacaatgagaacacatggacacaggaaggggaacatcacactctggggactgttgtggggtcaggggcggggggagagatagcattgggagatatacctaatgctagatgacgagttagtgggtgcagtgcaccagcatggcacatgtatacatatgtaactaacctgcacattgtgcacatgtaccctaaaacttaaagtacaataataataaaaaaaaaataaaaataaaataaaatagcgtcctgatgttctgctcttttcctttatcttgttttattttccttacagtagttctttgagagatagtaactcacgatagagaaacatggtctttgggatcagaacgtctggattataatcccatctctgttatttagcatctgttgcattggacaagttacttaacctgcctaagcttcatttttctcattgataagttgcagttaatagcttccaatctatagactgtgatgaataaatgggttgacatttgtaaaatgcttagaatgttgcttggtatgtagcaataattcaggaaagattaactatcagagcacttaataccatctgaaattatgccattgatatagtttgaatatttgtcccctcaaatctcaggttgaactgttatccccagtgctggaggtggggcttggcaggaagtgtttgggtcatgggggcagacccttcattgcttggtgctgttcttgcaatggtgagtgacttcttgtgagatctgattgtttaaaagtgtgtgacgcctctcctcttcttgctcccatactggccacgtgagacacttgctcccccttgtctttcaccatgactgtaagttttctgaggcctccccagaaaccgagcagatgccagcaccatgtttgctgcacagcctgcaaaaccgtgagccagtttaacctattttcttccttttttttttttttgaaaaggagtttcactcttgttgcccaagctggagtgcaatggcacaatcttggctcactgcaacctctgcctyctgggttcaagtgattcttctgcctcagcctcccgagtagctgggattagaggcatgcaccaccacgcctggctaattttttgtatttttagtagaaacagggtttcaacatgttacccgggcttgtctcaaactcctgacctcaggtgatctgcctgcctcagcctcccaaagtgctgggattataggtgtgagccaccgcacttggcccctattttctttgtaaattacccagcctcaartatttctttacagcaacacaagaaatatacaaatgacaatatgcagccatttgtatattgtctgcatcccaaattcaatgtaaacttcaygaatataaagatttacctgcattattctcactgtatttctarcatctgacatgacaggcacattaaatgaattaaaagacaaagcaaaagaaaataatcayctcccctcttttcccaatcagtttaaaagcattaagagattataacctgtcacctgcccttcgcattatactgtgacttacctaagggtatgtaatcagtagaktcaagatggttagaatccttgcacaatactggtttccggaggtgagagttggtaaaaatctttaatcctgttgcctttcaagataaaatcaattttagatcacataacaacatagactagcagtctggactggttttttgttctatgtatattttcaatttccacttatttatttctccatctctaattgtcatatatttagagatacttcactgacrtttcctaaattycatgtctttgagttccttagtttctctaattctaatggcttttgctctattttcctaattaagagctgttgatgaaaacctttaaataagagaggacaaaaaaagacatctcatatcataccccactrtactttcactactttgaatttggcatttttgttgaactagggataktatctcacttataaacactttaaatatagtagaatactttaaaatagtagaaatcaaattcgagggtagacgtargagcaaaatggggatttatattagacaccagtatataatgtacataatattatgtcaggaaagctgataattccctcacatattagttcttttcctaatattataatattattagttatttaaaatattattatagttttataatgaagttctaataaccttataacttaaccttattataacattataataaccttataactttataattataactttataacttttaaataaaattatattaatacaacttttaaaaatatattataactataatttattgtaactatatagaataactattatagctttataatattataactattatataattataactataagaactttattaagtctttttgctattataacattatttgagatattatttctcagacattagtactaattgtaaatttgtactctaagaattctgagattaaaaacccacaccatgaatatttctatttatttatatattgtcacatatattcaccattttaagacttagttgccttaccttcacaaggtcatagccatcttttccaaagtcagcccatgcaggtgtgtaataaattccattgtaaaggatatgtccatcttcaagacayggcactttaaggccatcttctaagttaagtcctctgaartaatagccatgtagtwmsctggaatrtagctgactatacacctagatgktagaagagartcaactgtattttttcatagaaaacaattcatttttccccacaagcagtatataaataacctatataatcctatgaatatcctrtgtagaactgtcatcatacctataccaaataaacacatattgagaaagtataggatcttagatctgtaaaaactttgaaatactatttaatcagttaaataaytgctgrctaaatcayattaaaactaacaaaaagtccatgaggctcaactggattttaatacattccagataaaggcactgctcaatactctttgaggactcattcaaggacattgttagagaatgttctcggttaatttactaaatctccctgagcctaagattagacattaatcaaaatgggaatactgcattagttctatagggttkattaatatgagaataaaattaaataatagataygggaatactcagtagagcaagtgtcaaatagtagacctttagcaattgttatttatttttaaaagtgttgstcattttttccataagagaatcagtataattggagtagagtcattktacatgatttctaacctaaaatattttttatgcctggaactctggacaatttttttctcctctagtttatttaaggtatcctgtttttatccaaaggtaaagacataaaactatactgtkggtrgtaaacaaagatggttttaatcactcacagtttgtgctgrcagctgaccataattccttagtagcaatacmctctggtctacmgcccaaagagcayaaagagagtttgaagcagccgagacttgaagatsgacattggatcctggtaaacttttttctttagaaaaatttaagttgacctgaaaatgaaaataaaagggcaaaaggayggcaagccatatgagaagaatcatcttttagactattcttaacttttttaaaaacacacataagttaaaagggctttctgtgctttacccacctaataatattattattaggaacarcyggatttggaacaacatccaaagtgaatgctataatcctgctactcttcaatcatccaacatattaacttctccatagctttcttttatttttcattttgcaattctatgaaaaattgggagtttaaacccaacastctcttaagttctccttagttttcccccaaattaaaaaagaatcatttttggcacctamctgattttcgaagcatttctcaattggaattgggtgctatcagtgaccatttctcctccaggatgcaagctatagacaagcatatstactgagggcgctaattcagggttaatgtctatagaaatggaaaatatgcccttcctccctgtgaaaagaaaatttcaaaccgaaaaagtgctttggtgagatagctgactgtcatcttgcagaaaccctccaytgagtttctagccatcctacccactgccaaagagactgccccracccaccaaatttaatttataargcatttctaggaggagttcataacctattccataaattataaaagaaagaaatagttgaacatttcttattacgtcaaacttcagtctacttttgtttctttttaaaaatcccttcttgtttgaatgtaaaartacttacctgtctttcttggaaaagaaagggaaggacaatgrccctttcccattatagtagtgtttggaatataattaatgcactattaattaagtaattattttttcatttggcattgtgcctattcacatgtctttacatgttccccaagggtagtttagggggcagtaaacagtcctaaaatgggaggattgtgacttttaaagaaaaatgtaaaatatatcccaattaaagcattctatttgtattaaattatatgctaaaattagaggcctcaccattttcgttgatctcaattttctgttgcccatgaagaatgattacaccttttgaaatcacctaggaaaatgaaaatataatcrtaaagtttagaggatagaaactaaatttcatttaattataaacgaatgtgatttacctccttttcttgtctgagcaatactattgacatgtttactagtaaactcaggttaccagtaaacaagcatatgactctaayagctatattcaagagaatttaggagtcacagataaacttgctataaagcaatttaatgttccacattccaaaacagttttctaagaccaataaacaactttttattcatatttgcaaatgctraattacatctaaatttattwagttcagtgaaacaaagttacacaaaggcattaagagtctcccagtgcttgtctggttttctgaaaggtgtgtttgatatgcaaggtataagcaaggcctgttcatccatctccacccaaaatttaaagaaaagaraataaagtagcaagctgggggtgctccagaaaaaagcttctctcacttcacctttatcagcaactgtgtgcaaatttgcatcagcagacttttgttatgatctctaaagtgcaaacaaaggctggagacttgaaatctagtacaaactccttgaatttttaaattacagttttagaatattattttaaaagatgctgagacttgcagaaaatttaaagcttccrtaagatcttgcagcttgaaattgcaggagctggtactcctagtccgtttaatatttcactgaatattaaaattgctttaaatctctgaagtgccaagtttgggttattagytcataaaaaaagaactgagcctcaactagctggaaaatattgttttgggaactagaacatttgcaaaaaggcataaagctcaaagtttaatgagcctgagaggtctcagcactgttggctgtagtagctcactgacttctcaaaatggaaagacagctctcgtaacagatgagtaaactgaagaggcacacagaggtactgatatttgtcaggtcacacaattaagaaaaaagcttaaaagactgagtatcaaattaattactgaaagcctgagaatcaaattaattcagcctctatccattcattctaaaatatgatattgagggttctctctgtgatgtgtaccctgctaggcagaattaaagtccacccagcctattatgaaagaatatgtagaagactggaattgtctaggagattagaaagtttcatttaagccaagagatgaatgctgaggaggaatcagctcggaaaatgaggtgcaggcaggttgggaactgyggtagcaaatgggaacgaagattgttatgggcagaagggaaaacctgtgggaggcttcggagccagaaaagcacatggcttgtccaagaaaatgaaagccctctgtgtctgcaataaagaaggctgaagtgtagaatgatgcaaaatgaagcgggcgagcttcacaggtgcagagcagatacagtgttgcaggcaaaagaaaggagtctggtatttgtttcaatagaaataggcagtcattaactgtatttcaattaggggagtgaaataaataatcctaattgctttttttaaaaatcactctagatttccagaataaagaaagaaagaagaaaaggagggaggaaggaagaagggagagaggaagaaaaaggctattagcagactcatttaaaatggaaatgaggtaaagtaattgtaaaggccttatcagatcagaggggggcaaacctacgctatttcaagagggaagctgatgacaagtagatcaattcacaccacagacctgcaaaatggctcagctctggattaggaagtattggatattaagtcgagcagaggtgtggccagaaaagaaggcaaaagtcaggggcatgtgggagtgtctttataaaaactagttaagaggttcagcttccctgtaatcccggtactttgggaggccgaggcgggcagatcacgaggtcaggagatcgcgaccatcctggctaacacggtgaaaccccgtctctactaaaaaaatacaaaaaaattagccgggcgtggtggcgggcgcctgtagtcccagctactcgggaggccgaggcaggagcatgccgtgaacccaggacgcggagctttcagtgagcggagatcgagccactgcactccagcctgggcgactgagcgaggctctgtctcaaaaaaaaaaaaaaaaaaaagaggttcagcttctcattcaaggatgcttggtatttctcacaccscagtatggcaatattattgttgacatgttgaaggatttctgtaccggttggtaaagagccacttccctgagctccccagagtcccctccctgcttccctagaacctctcctccacaaccagctcctcccactcccaccactttgcccccagtctaaatgagccatgcttggcttagctaagggcttcagtggaattatcactcataccttttctgatggtttggtgtccataccttgctggtttgaaatattttaatgtttgtggaaatgatgaaggaaagaaaaaatgcgagagataatataatgaaaaagtgatagaaattggtgatgcagtaaatagcacgaaaaaaagaagtatcaaaagactattccagaattctaagtttgcaaaatgtgagaaatcatgtggtactactttcattcttcacatagatagactcaaacacctttagttctcagaataatacacttcagacatctttgacctcttatattatttcctaaaataagcttaaatgtgtttctcatatcctctaatcatccagaaaactcctattcatcccacaaaatcctatttaggcatattctctttatgtattttttccttaaaaatatgtatatacatataaatgtaaatatataggcatatatctttttcctaaactagtggttgtcaaattttaatgtgcttcggaggacaagatttctaacttattcctatgttttttktttttttktttttttttttttttgagacagagtcttgctctgtcacccaggttggagtgcagtggcaccatcacggctcactgcaagctccgcctgctgggttcacaccattctcctgcctcagcctcctgagtagctgggactacaggcgcccgccaccatgccaggctgatttctttttgtatttttagtggagacgcggtttcaccgtgttagccaggatggtctggatctcctgacctcgtgatccgcccatctcggccccccaaagtgctgggattacaggcgtgagcccctgcgcctggccacttattcccagaatttctaaattattcctaggtgatgctgatactgctactctaggaaatatactctgataatcactgtcctaaactccagctagagttaatcattcatttttctgtaacacctcagtggccatacatgtttcrtttgtaacacttatgtaattctaatayatgttttgtccccagttatactttttctatttcttctattgtkacaattgctaatacagcacctggaatatgaaaaacattcaataagtgttggctgattgaattaattcatgtttcattaattttatatcatcttcmtaaatctcaatgaagtatcatgcaycyatttagacagtgtaaaataatccataatagcaatatattaaaatcaaactaatacttaatatcttytgtgtgccagaagttgggcaaagggctttatatgtattattaaataattatcttgatgattagacaatatattacaaaaaactaagattctctagaggtttaagtggctttcaaaaagtaacacaaagctagtacatatcagaactctggtttgatcccagcaatgtccaaatagaaatgggtaactctgaagaaagggtctgagaatgacagagtgcatatgggttgtggtgkcatggccttttccctcctttcttaaaaatagataccagttatataagttttatcatttatgttaactttgagcttcctcgtggcatataggtacagggatttcattaggttcaaagaagttttaaagaaaagaarcaattttgrttgtggaagaatrttttcagctcataccaaataattgaagtctgctgtgtaggttttgtcttcaaagtcttccatattgagaatgcagtgcactagcaccctcttctgctggttgcatctcagttcttccatctcttggacaatctttaggaagctattcrtcttggagtaaaatcgatatgcaaagtactcgggctgagggtattgaggcaacacccagccatgagcctggcaattttcattggccttgtaggctgcctagacaaaaaatcaaaattacgggtattttaggataaagagaaaggatgagtgaaagaatatttgataagatggtttatcatcatgctgctttatctctgcaagaarattttatagccattctacattaaatctaacccaattccccattttctagttatactctagagcgaccactatggtttttacaatttagtctattcaagtcctacttcaataatattacattmaatattttactgtattctttactataattattacttttgctagcawgtagattgctatatctccctcactataatacgaagaacccatgagtgcaaacgtttaccttgctactgataacataatatgaagttttgctgaaagatgggaaagtttttatgaaatacagcaaggagtttactctgaccatagtaatttaccattatcaacacaaaaagtctgaggagtcctttaaaaatatctaggaaggattgatatttaattattacagatagtagttyacttctctcttgaatatatccagagaaattctttacattattccaaggtaatagattacagggtttctcaaatatttccttctataaaaacacaattctctttctatttccttaataaaagtgaagcgttgcttattttcagctaattctcctttatacaatttagtatgtatgctawccttctgtcttttcccgggactcttaaaataatttttaacctacttttcatagggcctatattcttaatatttaactatttttcagtactctagattcacaccaaggtgtawcttttcatttctgttccataaatataatttcgcayagacctaaaccttagckagccagtgcagttttttgtttgcttgtttgtttttattttacttgcctttcgtttaacttactttcaaagtgatatttgggtatgtaaacgtatatgtgtccaagaaaaactgagcgatgccatttacatctgtggtgtagtttcccaygattttgtccttcagatgcaactgracaacttcatttgggattggagagttgtctggattaagcaatttaatctgtacaagaggaagaaaatacatttcggaagcatgtagtaaatttgggaatccattttgatggcatttgccaagcttctatcatggggacccccgctctccttcgtacgtatgcacttcctgcgtggtttcatctattcctgttgagtgtatgacatgtaccattaatatactaatgagcctaaactctgtttctcctgcccacgaagatctctgaaaactcaggcccatagaattaatcatcctgagtattttttataataaaaatgctacagaaaccctcaaattggaatgatttattactgtgcccaaccttccttttttttctctttctcttatttatctcagtgaatacctcaaccattcacttagtcactgaagtcaaatatctagagacatcttagactttttattttccttctcctataattttcaattgttgataaaatattttcaattgtatctttttaacattttctgtttccagcttatcacatttgttcctgttgctattccttgtatcaatagcttatcttttttccctcatacrtcttctatttttttctatccagtctctctctcctgtattgcttttgcttgttctttctctatactggcatcaaascaaattttctaaaatgcaaaatttagcattatcctccctaaaacattgtagtgactgctctgataggccatggttattygctagaaatctctttctcattctcttactagtacaggcaatgattgctttaaaaagtcccttctgaaattgtatgatttgyagtagatacaatgcctgcatcagtatctatgccagtttgaagcctttaaaggcaccttcttaacaacatctaaggccacaacaaccagaagaagactgtctgagmcatcctttttttagctcagtcagtttctgcaaaacaacttctgctttgagcctttcatcttatttctgccacttatcattttcctgctggtccaggcaaacacaatccttttttcttgctcagcatctgtagactgatgccttatttgcaccatctacgcagattttgaacttagtttcatctcaaggcttgatcttgtaagaaaaattcaacttgtctcagcagtccacaggccacagacacatgacaccatgcctttatgatcacacagaggtttgctctaattttagtacacctagactagaaagatcctttgagtcccttccagtcacagaaagatgaacaagccatgtgatttctgggcactttcctttctttctttgtccccaaacccaaatagtgccccaagtgatgacaccaggcccattatcaactgccggggccaggcatgcaacacttcattagcagatgtttcttgtggcaaaggtatttgtcgtatatcctacaattttaaacagtatcatttcagccatccacggatgctgctactgtcacttatgaagaaatacccttgttagcccaccgccttgcccagcttcctatgttcacatatgttactcttggagtcatagctctgaggtcttgaaatttgtaggggacactaaaaaagcagatagtatcttcattctggaaataaagcttactctttaaaagtgctccctagcaatactgagccacgtgtttgatggccttatgacacaacacatggccagataaaccatttttaatttccagtaatgcagctactgtagtgactcactatatcacagagaaaccagtcccttttccaaaagtagaacaggaatgacttgtttctcctggcacatctcccggaagtgatcagagcattcaccactgtgaaatggccaaaaacccaaaagataccactttatacaaccatgtttttgaactaaagcattttattgtttgagactcacatctgtttatagctgccactggtctccctaaaatgatcaaggaaataagagctcttatatatgagttttcaggaactaattctttcaaatgctaatgaagagggtgtgtccaggcaggaaactgtactgtattacaatatattaataacagactactttgtccacggatgcctgattcatgtaggtaccacctatcccctacctccctgataaactattaccaacctcagctagttttcccagctctcctctataggaaaaggtgtcttggagttcctgattataggataagataatactataccttaaagtgtcaagaagctttgagagggaatgggaaggagctgggccttaatgactaggctagggcttaagtacacacatacacatacacatacacatacacacacacacacacacacacacacacacacacacacacacacccctctcaaccatgtcttatgctagagaagacagaaataaaacccctgagttaatctggagcatgattgactggcagatttcagtggattattgctaattttttagaggggataataggatttaggtaatctttttaaaaatatctcaaatcacccttcattgagaatcactattctaagagtggcaaaattctaatttatcactttttaacttattagccaataaattttgccatttggcaatgtctgcaaacactttgggctatcacaaataggaaggggatggtgctacatcccaggtagagacctgggatgttgctaaactcttaccatgcacagggtagcccccacagcaaagtatcatctggcccaaaatttcagttgtgccaaggctaagaaagaatggtttagagaaacaatgcatctaagtaattattgtcaatgtctgctaacatctcagtaagagaggaagagtgctctctgtgaaaagtacatgacactacctacattatattcttgcctactgcacccaccaaaaatgaacttgaatctgatcaagcttctgaacctcactactggtttataggaaacacagtggactgaaagtagttgcttctggggaagtattcacgaaatgaacggattagaggggagaggtgctcattgttcttcatactttaatttacagtgttatttttcttgttaatatatgtgttgtccgcaatttaaaaattacttattttccttcccagtcatggtagctttgacagagcataatggcggtgaccacgtccacaggggtgctggcgaacttgtcagaaaagcaaagagttttatcagcttctgaagaacctgatcaatccaagctgtatggtgcggaggcaagcagaggaaatctgtgaaaatatcccaggatcctcatctaagggtaagggctccagcctgtactacacttggacagatggctacagattttgcacccaatttccaaaagacatttcatgaaacagtgattccagctctgttacgtaccatgcaaaatcaaggtaatcagcgtgtgcaatcacatgcagcttctgctcttactgtttttattgaagactgccccaaatcattcctagttctatatttggatagtatggtgaaaaatctacattctgtcttggtgattaagcttgaagagttgattcggaatggaactaagttggccctggaataacttgtggcaaccattgcatcggttgcagatacaatagaagaaaaatttgtcccatattatgatatattcatgccctcactaaagcacatcattgagcttgctgttcagaaggaactcaagcttctgagaggaaaaattattgcgtgcattagccatattggtcttgctgttgggaagaaaaaatttatgtaagatgcatcaaatgtgatgcagctcttgttgaagacacaatcagacttaaataatacggaagataatgacccccagacctcttacatggtttcagcatgggctagaaagtgtaaaattcttggaaaagattttcaacagtagctttccctggttatcgagcctcttattaagactgcttcagctaaacctsatgytgctctcttagacacacaggatgtggagaatatgaatgatgatgatggctggcaacatgtaaatcttggagaccaacagcgttttggaattaaaacttcaggacttgaagcaaaagtaactgcttgccagatgttggtttactatgctaaggagttaagggaagggtttgtgaactatacagaacaagttgtgaagctgatggttcctttactgaaattttatttccaagacaatgttcgagtggcagcagcagagtccatgccttttctcctggaatgtgcaagaatttgtggcccagagtatcttgcacagatgtggcaattcatacgtaaccccttaatcaaggctattggtactgaaccagatacagatgtgctctcagaaataatgaattcttttgcaaagttcactgaagttatgggagatgattgccttaatgatgaatacttggaagaactgggagggacactgagagcaaaacttgaagggcactttaaaaacgaagaattgtgacaggttaaaagtcaggaagaaaactatgatcaaaaggttgagatgtctctgcaagatgaggatgaatgtgatgtttatattctgaccaaagtatcagatattttgcacacattatttagtacttataaggaaaagattttaccatgatttgaacaactacttccattaattgtaaatctaatttgttcaagtaggccatggctaggcagacagtggggactgtgcatatttgatgacatcgcagagcactgcaatccaacttcatttaaatatgtagtccaacttcatttaaatatgtagactatttttggtggccaatgctactaaatgtgtgagataacaaccctgaagtcaggcaagctgctgcttatggcctgggtgtcatggcacagcttagtggagatgattatcattctttatgttcagaagctgtcccactgtggtaaaagttattaagtgtgcaaattccaaaacaaaaaaaaaatgtcattgctacagagaactgtatctcagcactagggaagattttgaagtttaagcctaactgtgtaaatgtagatgaagttctttcatactggctatcatggcttccactgcatgaagataaagaggaagctattcagactttgagttttctctgtgacctaactgaaagtaaccacccagttgtaattggtccaaataattccaattttcccaaaataatcagaataattgcagaagaaaaaattaatgggactattaactatgaagatccctgtgccaaacgcctagaagatgtcgtgcctcaagtacagactcctgaagatttatggttggaatgtgtatctcaacttgatgatgaacagcaggaagccttacaggagttgctaaattttgcttgaagcactttaatataacttgaatattatctaccataaaagtaactacaaataagtgttgtgaatggattttattaaaaatcagtgaactgttttctctctgctaagctgtttatagttcttcctatgtttctccagaattagtcaatgttagtcctctgtttatcttgtatgttttatctcccaaacacaaaccttggtgataacctgtgcttcaagctgtcttacaatatttgtcacctttcccctagttgatgtgaagtatataaattgttgctatttgtttgaactattatcaatgctagccaagcagtatacttgatgtgaagatgtcatgctatcatgatatgctaagagctcatgaaaataagacagaatttccaggacaaacatctttggaattgtgagtgaaggatatagtggcaggcttgtccctccttgattaatactcttgatatttgtggtgatgggaggatgctggaactaggagagagttttgagatactgcagaggatgtgggatgtatataaactttttcatggtgttctcctgggaactgggtgggacatatccatattctagttcccaaggtgtccagctgagagttagagaactttaaatttctttagccagactggtctctatttttttaagttatccaggactccaagaaccatagttactgaaaagggattcctgattcatctaacactggtagcatgtaacagtgttcgacaaatagtaagtcatcaatattcttgggagtcagtgttgtgtgtttcaggagagtattattttgtatatgtatgccatttcccccctgcaaagcagttcaacaagaagagaagctctgattatagggcttaaattgatttatatttcaaagaatttcctaatagattctatagtagcactgaagagtattctattgtaaaactcggaggaaagcaaatgtaattttctttggacatgaaaaagaaagcaactttgagagtagtcatttagcagtagatgtgcattattatgagaaaacagttctataaattcagggttaattmtattaattggaatgtcggtctctaatgtctagcttattatagggtagaaaagagctttctactcagctaatcattaatcattgatccaaaacttaaatacatctatcatttcctggggctattgtgagtactgtatatgtatttagcaaatatttaagacctagtaagtgctcaataaattgtagctgttactacaaaagaaaaaattactttttaaaaaaatatacaaccataatcacacatactagagaagaaaacttaaaactctaagtaattcttaggtaaaaataaaaataaaaataatgaaatcatcaraaatgattttaattgaacttaaaaattgttaagatggtaaatttgatatgtgcattttttcataatttaaaaaataaaaatagtatagaaaaacacctgtgaggaggaaagwagtattcaggaaaaattgtataaatytgaaaacatggaagtttaacataagtatttataacaagatgctagaaaaaaaaaaccaaaagaggtagaagaaaaaatataataaaaataaatgatgtaatgaaaatcatttaaaataacattaaaaataaagataattaacaaatccaaaaactaatgggaaaaaaacacaaacacaactagtaataaaaaaggggaaataaattatgatagatttattttttcaaatcataagtgaacatattttatgccctctattttaaaacctaaatttaataagaaatatctagatacagaaactaacatattatagaaaattcttagtgaactaaaaaaggaaaattttttgactcgataaagtatgtctcacaaaatgctacagttacttagtaggtttacgcattacatttttaaaagcattccccaaaatatgcaaaatacaaccaggaagtccactatcatctctaatattcawattggagatctttgccaatcgaataaaacaaactaataacaaaaacctcagaagattaagttcagaaaggaagctaaaatataacattttcacacaaaatgctctttacacagaaaacacttttaaattgcacagaaaagatacaagagacaaatgggaacccaagaaatcatcttgggtaacaacaacgtaagagggaggaaatggagaattctcaagtctagataaaattattttatattcagaaaaaattttatattctttgaagatatctctcagttttatatatttagtaacagaacatggaaatatataaagcaaaaatgtacaaagtgaagagaaaggttagaaaaaattatgttaacattatccaccactattcagtaagtgaagtgaacatatatcaaatttatctatctgccaaagctgtatttcaatctaaatttgttcattaaatgacttttactgaaatttgtttcagtaagtcctttaggtgatgctgatgccagtttgagaaactgctytgtaagatgtaagccaggctacccacttttgtatttcttttttagtgttcttgtgtcaacctaaatattacttcctcagggaaactttccatgatcatttagtccagattttagcaaacttctttygtaaaacaccatggtctctctctcatatattttkttattttttaaataatcttttaaaaatgttaaaaccactcatagttcactggctgtatcaaggcaggcctctgtctgatttgcctatgggctgtggtttgtcagctcctgatgtagagtagttaaatggtcagtatttcactgacatagcacctatcacractacaataattctttgtaaaattatctgtttaatgtttattatctctattacactataaactccataaaagcagtgataaaagtgcctctctacatcaccattttattcctaatactgatrtagactatataatttattgtccaaacttggacacttttagagtgaagtggttgtaactattaacagttacaacttgataaaacatatacaccaggacagatctatgaaaatcaacagtgtaggtcaccctacagtgcttagcacagagattcctacatagtaatttcttagggaatagctgttggaagattagtagataaatgaaagaacaaatgaatgaatgaataaggtatgtaaaaaatgattgctttctwacctggccaaaataagggagtccctgtttgtaggacatatccatattctcaaaactaatcttcaccactgatgagtctatgtataygtacttggagcctgtaagctgcacacctgcagtcaattaagtattattgagaaaatgtcacttccaaaaacagacaaacagagcttctgaaaaaaaccacaaaagctcaccattccttctaatagtttcccttccctttcctaagcagttttaatatrtaggtacttcagatgtcttttataaagaaagttaatcaagayggcacaaaatgcttgtgccaactggtgttgctgctttttataaaatatccaattcacttaccatttcttcatgatggattagtaaacgttgatttctcattattcctaagtgattgtttaacaacatttcttttactctctgcttgcctaaaacatatgctttaatttattaatagtaagaattgtaatatatgtgtattattaaaaatggaaatgcttaaaaaagaaaatacaaattaccaaatatcagatatctccaagagaaycaaaattagcattttaggctttttcccacaagttctatttctytttatatttatcatttatattaatatgtttgagattgtgtgtgtatatgtgtacatgcacacatacactcaatatgtgcaaatgtrtatgtagttttacatgttttttatcattattttataaagtttttgtaaaaccttataaaaacttatttttaattgctacattatttctcatataaatatggacatatgttatcatgtagcaagcccttccctccttccttccttcctgccttccttcctttccttccttccttttctttcttcctttctttctttctctttctctctcttcctttctttctctctctttctctctctctttctttttcttttttttttcttgagatagggtctcattctgttgcccaggctggagtgcagtggtgcgatcatggctcactgcagccccaacctcctgggctcaagtgatcctcccaccttagcctcctgagtagctgggaytacagctgcatgacacaacacccagctaattttgtattgtttgtagagacggggtctcactatgttgccaccgaggatggtctcaaactcctaggctcaaataattcttctgcctcagcctccccaggtgctggggttataggtgtgagccactgtgcctggctattcttttattatttatttagttcagtatgacaaatatacctaattatcaattaaatgtttgtttaatacttgaatttcctctggatgtgacagatacctctaaaactttgaagactgatataagtacattagtaatttaatatttcasgaacagaaattttgctgaaatatcagttacatatgcrtaagtttaaaagyactayagtaacacaaagtggtcagcacagaaaaaagcatttcaaggattaagacttaccattttgtgctttaggaagaaggggtattaggtccaggagatacaagaaattagtcattagaaatattattggccgggcgaggtggctcacgactgtaatccmcgcactttgggaggccgaggcgggaggatcacctgaggtyaggagtttgagactagcctggacaacatgatgaaaccccgtctctctactaaaaatgcaaaaacctagtcgggcstgatggcgggcgcctgtaatcccagctactcgggaggctgaggcggaagaatcgcttgaacctggcgggcggaggtcgcagtgagctaagattacgccaccgcactctagcctgggcaacaagagcgaaactccgaaaaagaaaaagaaggaagggaggaagggagggagggagggagggggagggagacagattttcctggatgagataaagatttttcactggatttattttcagaggcttagtaaaatattctccccaaactattttacttcccatgttctaattctatgctcaccaaaaaaattttataatcgacaactacatgtctcaattatatttatctgtggaatgattaaggaaaaggaatatgcttatatctaaaaccagatactcccattataaatcaataaattggcattcttacttctattgtagccttatttgaatgtaayacttgaccatccatcaacatgtgtgtgaaaattttggttgatatatgaaacattcagaatttgaatcagatgaacccaatgaaaagccctcagggaaaaaatgattgtattracattgtatagttggcaatcaggtaacaattcgaatgagacagtgatatccattggggtctggcttcttagagagcattacctgttccgttctctgtaacaagagcatgcactttgaggaaactccagtatccttaccgatttmactcaaaagcayctgtgttaatraacttggagacacagccatctttccccaactgaaaagaacaataaaaaaaagttatattktaaaggaagactgtaagaaatacctatataatataatagggaaaatgtgtgacctcactgaagcaactttaagaatattgtattacccaagttttagttttttaaaataatccattgtgtttctataattatattttcagttcatgtatttacctataactatttattttttaataaatattaactcttacaatattgtgttttaaaaaactcttcatggtgacattattttgttattrtacaagataataaacacatccatcactagtcacgtattcacacatgatatttgcaattttggtaatttcagccatattcttttacagttttgaaactgagttttataytatttagttaccatgccttggacatttatgggactatttacacagcagttaggaacacaggctttacagtcaaacaccagaatttgaaccctggctttacyacttattacttcatacaaaatgaaatcttaataaagagcttgtagaaytgtattacattagayaataactggaaagtgtttatttagcacagggcctggcacttagtaaacattcagtaggtagtagatttttwaattagattcctttacatttctctcagtgtctagtcaagtgacaatgtctcactaagtgaaatttttaaagtgtcacaattagtaaccaaaattaaacaggatgaattgtcaaatatttttaaaatgtgggataaattgtgctcataggttcctggactttaatattggggaaaaactgatttcttattctactccttcatcttatgatgatatgaggaaatctagtcctcaagatgtgggtgagatgtcaaaatcctgtgctacttcagggggtccttgaaactataagaaggtctagaaccatttccagaagcttaaagatctagaaaaatttccactatactaaaggtgaataatkagataaattatttagtccacactcctgctttacatgtgcatttgattattttaacttttattttaggttcaagggtrcctgtgcaggtttgttatataggtaaattgtgtgtcatgggggtttggtgtacagattatttcactatccaggtaataagcatagtatccaataggtagtttttttgatcctcaccccttcccaccctacatgtacattttaartttccagakctctcaaatctcctgaagggcatyctataatatagccrccttcgataatgcattctgggatctacctaccctgtgcactcggcttatattggtttagtctcttctagagtgtgcatctttaaagattatgactgcttcataaagtgcaaaacccatgaggatagtacctgatctgtcttgctcaacaatgaagcttctaaataaaattattcttgcatattaaaagacctcaatatttatctgttgaatgaatttgtggagaaaatttttgtatccctgatatccctaaagatacagccccactagttatttaaatatttatatgacttggttggggtgcagtggctgacacctgtaaccccagcactttgggagaccgaagcgggcagatcacatgagatcaggagttcaagaccaggctggccaacatggtgaaaccccgtctctattaaaaatacaaaattagctgggcgtggtggtgcacgcctgtagtcccagcttcttgggaggttgaggcacgagaattgcttgaacccgggaggcagaggttgcggtaagccaatatcgcgccactgcactccagcatgggcgacacagtgagactgtctaaaaatatatatgtattgacatgtatttatgatctagttttgctgcacccatgatcttgagcaatgtatttaacctctttctgctttaatccactcatcggtaagggggcgataatagtaccccctcatagggtactatttgttttgagaatcaaatgcacataaactacttagctcagtgactgacacamaataagcatccattaaatgttagcaattattattattataattgttactattgttagcgtttattgtccacattttttwaatttaagaattagaaggttcttmattatttccaacctaaagtattctctaaacrggacaggaatatgtgacactgtgtgtgtgcacctgtgtgtgtgtgtgcacacatgtgtgtggataaatggtatcacactrtagtatggggattgcagctggcagttgtatattagacagtcagatctggcatgattatagctgaaagccttgctacatcctagaccagcctgtttgtgtccgttttctgaatgttggttctcaaaccttccaagtagatcttttaggaaattcctcctttgtcagtttggaaaagttgattcttctctttagtggttaagaacctgactgatagggttcccatcyggagctcctatatacacttatttccagtgagaataggttgagaggaaaataattatacatctaatactcttgaatatgcagaaacrtcacatctccctgactaaattcacaaagtataaaataaagaacaggacatatgttcccagtaaattgatagggtgtagattttgatatgaaaccaaatgtatttttaattaagaatcgaaatttactactcagtttctgatactataatttgctttttgtcagtcaatagaaaatgaaacttagcatgacaaaagaggaatataaaatttacaaataggaatagaaatatagaataaaagtatatattttaactgtaaagaggaaaacargaagaaaggaaggtaaatggaaggtgaggataaaaagttaaygsaaacctatttataattttgctgatatacctcttacctgaatggtaaaatttttacagagtgaactgataagatgagcacatgaatgataagccgtagattctctgcacacactaagttggaccttcccgtccacaggttcaccataggtatatctaatagaagaatataacaayaacacaattacagaggtcaaggtcgtttttaatctgtatagggttttgaaacctttatttagtagctgaaaccagcacygtaacaacatttaaatagctagttaccataaattttattttctggaggaaatctaaaacaatggtatggactaaaattgagttgaatgctttaggcaaaaatatattttaattaaaaaggttgaaataggcatgtagacgttatatatctaagtcactaaaatacaatgtaaacaaaaaaacaaaaaaatacatcagtcattatttcattaaaaataatattttttgcatactgatagcaatggagtattgaaaaacaaaaaatraaataaaataacattttgcttcttttagtttttttgtttttaaactgctattatgagcatattttatggtttttacttttaaaatgtaaattatatttatttatttattttttataaatgtcattttaagycatcagattttggggtaatttctttttgtttgttttggaaagaagtaaaactgttcattattttttattattatattttaagttctgggatatatgtgcagaaggtgcaggtttgttacataggtatrcrtgtgttatggtggtttgctgcacccatcaacccatcatctacattaagtatttctcttaatgctatccctccccttgcccccaacccccgacaggccccggtgtgtgatgttcccctccctgtgcccatatgttctcattgttcaactcctacttctgagtgagaacatgtggtgtttggttttctgttcctgtgatagtttgcagataatgatggtttccagtttcatccatgtccctgcaaaggacatgaactcattcttttttatggctgcatagtattccatggtgtgtatgtgccccattttctttacccagtctaacattgatgggcatttggrttggttccaagtctttgttattgtgaatagtgctgcaataaacgtacgtgtgcaggtgtctttatagtagaatgatttataatcctttgggtatatacccactaatgcaattgctggtcaaatggtatttctggttctagatctttgaggaatggccactgtgtcttccacagtggttgaactaatttacactcccaacaacagtgtaaaagcgttcctatttctccacatcctctccagcacctgttgtttactgactttttaatgatcgccattttaactggcatgagatggtatctcactgtggttttgatttggatttctctaatgaccagtgatgatgagctttttttcatatgtttgttggctgcataaatgtcttcttttaagcagtgtctgttcatatccttcacccactttttgatggggttgtttgctttttcttgtaaatttatttaagttccttatagattctggatattagccctttctcagatggatagattgcaaaatttttctcccattctgtatgttgcctgttcactctgattatagtttcttttgctatgcagaagctctttagtttaattagatcccatttgtcaatattggcttttggtgcaattgcttttggcgttttagtcataaagtatttgcccatgcctatgtcctaaatggtattgcctaggttttgttccagggtttttatggttttaggtctaacatttaaatctttaatccatcttgagttaatttttgtataaggtgtaaggaaggggtccagtttcagttttctgcatatggctagccagttttcccaacaccgtttattaaatagggaatcctttccccattgcttgttttcatcaggtttgtcataggtcaaatggttgtagatgtgtggtgctatttctgaggccactgctctgttccattggtctatatatctgtttttgtaccagtaccatgctgttttggttaccatagccttgtggtatagtttgaagtcaggaatccaacttccaagggatgtgaaggacctcttcaaggagaactacaaaccactgctcaaggaaataagagaggacacaaacaaatggaaagacaatccatgctcatggataggaagaatcaacatcgtgaaagtggccatgctgcccaaagtaacttatagatacaatgctattcccatcaaactaacattgactttcttcacagaattggaaaaagctactttaaagttcatatggaaccaaaaaaaagcccgcattgccaagacaatcctaagccaaaagaacaaagctggaggcatcactctacctgattcaaactatactacaaggctacagtaaccaaaacagcatggtactggtaccaaaacagagatatagaccaatggaacagaacagagccctcagaaataataccacacatctacaaccatctgacctttgacaaacctgacaaaaacaagaaatgcggaaaggattccctatttaataaatggtgctgggaaaactggctagccatatgtagaaagctgaaactggatcccttccttacaccttatacaaaaattaattcaagacagattattaaagacttaaatgttagacctaaarccataaaaaccctagaagaaaacctaggcaataccattcaggacataggcatrggcaaggacttcatgtctaaaacaccaaaagcaatggcaacamaagccaaaattgacaaatgggatctaattaaactaaagagcttctgcacagcaaaagaaactaccatcagagtgaacaggcaactgacagaatgggagaaaatgtttacaatctacccatctgacaaagggctaatatccagaatctacaaagaacttaaacaaatttacaagaaaaaatcaaacaaccccatcagaaagtgggcgaaggatatgaacagacacttctcaaaagaaaacatttaagcagccaacagacacatgaaacaatgctcatcatcactggccattagagaaatgaaaatcaaaaccacagtgagataccatctcacaccagttagaatggcaatcattaaaaagtcaggaaacaacaggtgctggagaggatgtggagaaataggaacatttttacactgttggtgggactgtaaattagttcaaccattgtggaagacagtgtggtgactcctcaaggatctagaactagaaataccatttgacccagctatctcattactgggtatatacccaaaggattataaatcatgctgctataaagacacatgcacacttatgtttattgcggcactattcacaatagcaaagacttggaaccaacccaaatgtccatcaatgatagatggacatatacaccatggaatactatgcagccatgaaaatggatgagttcatgtcctttgtagggacatggatgaagctggataccaacattctgagcaaactatcgcaaggacagaaaaccgaacaccgcatgttctcactcataggtgggaactgaacaatgagaacacttggacaccgggtggggaacatcccacactggggcctgtcgtggggtgggggcagtgrggagggatagcattaggagatatacctaatgtaaatgacaagttaatggrtgcagcacagcaacgtggcacatgtatacatttgtaacaaacctgcatgttgtgcacatgtaccctagaacttaaagtataatttaaaaaattttaaataggtagaaagagcaaagaacaaaattgcttgtaaggaataacagtagattcctctgggctacgttttakgacaatttctcaatttcatcttccaaattactaattctctcttaagyatcatcgatccttctagtcagcctttctacacatatatttttaaattaataatatgcctamttccaaggtctttaattatttttaaagttacactattgactcatatctgagtatacacattttacttatttctaaatytttttctgattgatgttcaacagttttctcaggtatatattgctcttttttttgtttatatwataccttgatttcaagtcattagaatcttcaaccatttagtgattcatgcttatgttttgggattcccagctggcttgtcctagagtgctttattttgcttatgcaatacttctccagtaaaaatgacacaggagccaacacacagccactgtgayagggaagtacctagacatttgggctttggggatttctgttactcaggggattttccagcaatgctggcaattccctgcctytatgacccaactacaatgagacttttcagtctctgccttttctgtattcttccamctctggaggtgaagcacaaggtagtgacatcaaaaagttagccatgcttcttcttgactcttaaagacttccagcctaaagtagacacaggaaggaggrcaggcaaagctttcaccttaaagtttggcatggaattttagattactgtartgaagctctcctaataactagaaattwccaggtcacttttttatttttaattatgcaaaattaaaaggaaaagtagtacacatgagtcagggaaaagtagtacacatcaggtctgaggagacaaagttttaatgtttgyaccctggctctctttgctggttatataaactcygtgaatgttgcttamcttagtgacaagaggggaaaacaacctgacctgcttcactgctactcctgccacacgttaatcctcactatttgcccctaagtccctgtctgcccttagtatcctccacactgtgccccgccattaccctagagccacttgtaactcttacagcagttttctctgtgatacatcttgagcttcagytttcttttataatcatgtaatacataaagattgaattgagaaatcrtcataaacagaaratattgtccaatggaaatttctgggagatggaatgttctatgttttatgtctatgctctccaattcagtggccactagtcacatgtgacagcttgaaatgtggctaacgcaactgaatatttagttttaattaaaacttaaataaccacatgtggtcayggctactgtattggctggtgcaaaacaatatgttatcttatgatgtaagaaagacagtagtcagttgtcttaaactgttacataaaaccacgtgtcataacatgcattaaaagaattatagatgcatggaagaattcataaaatcagcaaaanaatttmacaccttctttttcccttaccttctacacatttatattttacttctttttagccatctatcccattctantatctttctatgaatacattattctattgtgtacaatttcaacttacaaggcacagacattcactttgaattcagagtccacaactaagatattttctggtgcatccacagtcatttgaaatttgggtaacactgccagtaaaaaaaaaatatatattatattataatgtgtatattatatattattaacataaatacatattaacataaatacattcatacaaaacaattgtttctcctttacaaaccatcaacctttgcttatgtttgccattaataaacagtgtgaggaggacgytgaagtgcctaagactggattttggaattggatagaaaaatgcatattttgaattccaaattcatcacttytcaggtgttgaacttgggaaagtgtttctcaatatcttcatctttaaaatagtaataaagatactacaatagaaattttatgaagattttaggagaaaatatgaagggactaatggctaacatatgactaatgttaattccattcttctcataagaagtgctttacatcccagaaactatcatataaaatagaatccagatactacaaaaggaagatagatagcctaggttaacagagaattgcaggaagattatgggctgaactaggagataaaaatcacagtagatggagaaccctaaaatagtaacagaggacaaggaaagaggaaaggaagagatactcacttgaaaattcattatttaataatcytgcccttgcaaaattggaaakattttataatttttttattrataggtaatattttcattgctattatttaccatattcttccacagagaaggagtgatatgttttcttctcattgagcatctccayggtgatttcataccatccgaggatgggctctgagattaactggaaggagagttgtagaatccctcccacagactcctcattcacccactgttgtattcgaytgccttctggatcctgagaataagaaagcgtatttttgcatgctggatgtttttattcattataaagtttcagcaaggtgtttcctacttaggtttccaacttacttaggattcaaaacatgagtgcgtcctcacatcacccaaggagaattggttactctcctatctgaggtcacatagatgcatattacagyacttagtatattttagagctagctgtgatttttttacatttattttctgtgtcaatctctgatttcttaaaggcgagccatattttatccccagtgcataaaacattaagtgtacatttatatacattcaacaactaaacattaaattaaatacaatcatacttgcccgttgtctatattattattgtctgtattaatgggtgcatgctaatatgaatcacatggtggtgggggtggaaacctatttctgtcctcttgrggctgtctrcatgaaattaataattctgcracaatttaaatagacaatcttccctgtgagctgccttttgattttgaggtttrgagagatgttcaaaaaatgagaaaacaattcttcaactattagttatcttacctgaagggtgatcactggatactgaaataaaaataaaaataatgttaatatatgaactcaaggttttttttctagatgagtgaagaggttaattataaatctattatkaagcaaagaaacataaacacatttaggacaacccaaacaaatactgatttctgactgaaagtttgaatatctattgattatattgaaactcatctgcctagttttcaagaattttcatttacttctctctctttcacaacatacaccctgcagtctcagtaagcaaycctgcccttgggtctctccaacataataaaaatgccctcttagatgaatmataacttccttatcaacaaattcgtggtcagtcttcactctgacagttgcaatgttttacactgctggttgcctctttttgaaatgcttcaattttgatttctgtatctagcactaattktttttgtcttagattattggccattcctatactccaccatttccttatcagacaagtaaataaaygtagacatttgcccaagtttcccttgcagagtttcctctccttcttccttctccttccacctctctgtatctcctctcagttctctccatgtttaccactcttgccccctctaaacctatagtcaacagtttgactttcatctcttagtgttttctctcaggaccttaaaactaacaagttgaaattaaagactcctaggccagaagccctcatgtgaataggctgatgagaattttaaaaatgagtacatagggtcctttgcccactccccaagttgctaagtgctccttcccactaattgcagcattcattcactaataaaacgtaatgtgtctggagatargaacaggattcataaaccttgtccagaattcttggaactgagaaatataacagttgaattaagggcctacttgttattctaaattcatggaattgaatcttgatgaaatattgagatggtattgaagaaagctactgctgcaacattaactcaagcattaagagaggtagagcttctcatgagatttcctcataggaagaaaatgawtatattacccaaaggtgccatgggaagacgttaaccatttggatgagattctaataatgagaaatgaacctagagtactatccctttttgtttgctatttgtaatacttccaatgcagatggcttcaactgtgttcaacaaatttagtttttattacttaatttgtcytttttttttagatttttttttaaactcagcttggtctatttcaaaaaactagtgaacaagaacctagtaaaatcacattttcattgttctaagctgcttgatttttctctaaaaacaattattaaaatgaggctgattctgctstagtcactaatgactgtctgcactaaatcttgtataaaccagccaagaaccaatacaacaactccttcatgtccccttctggttcatactatctctccctgtccatacacagggcctctttttagaggactagtagttccaggtcttaagataagtttaaagaaagatctgaaacttcttgatgcaaatgaaactttctggaaaaagtatgtttgaataytctacaaaacactgacttaaaggaaaagaaaggcaccatcagcaatgaaattgcagaaaatgaaagaaaagaccgatgtargatttgggcagaagaaactaggtatatgctcyatatcttggctcatttgataatgagcccagttgcatcattactatatttttattatgtagtcaaatttattatgaatrcccaaatctcataggccagccatgcattgaatctatttatctaaatggaatactgaaccagataatgtccagcaattagaaacactggcttgcaaagataaaaccacataatctcttagctgccatcatttttggaaatgctacatcaatttccatctctatacataagcacatgcagtttgttgtgccatggaaactccttgccataaacatttggtacaaaygatcttcttatctatgacccatatttgagggaacagtccattaatcctgttcttatgcaaatgtagttattactaaagcagggagttggntaatcatatttggcctaattgacaataataagtcaacattcggggggtgagaactaataagggagttatgataatgctgcagctgctttgattttcaagaagncctttacttccccatggtgcttccaatcaaggatgattgtcaaaggattgcagtagaaattctcactgcnttggttaaatagaggagttgcattcttagaaatagaagcttcaaccatgaaccaaggagaacaggaaccacatgctatcttacngaagtgatttcggatttagattactacaaggtctttggagcactaaaaattagattcctgctctggaaattaaaattaagcaacagtctagtgaatgtagcataactatagaagatggggaaaggaggtggattaaaagtgacgatgtcttaaggatgaagtacaatttggagggaggaaaaggcactaacagagaaaccatctgcacagcttctgtaagcttcagaagcttcttcgtaactgcgctcagttgatagattgatctgagagaccacaaaagaatgcttagttctaacaggtttctaaactacatgaaatgaaatttgtcaggtatcctgttgtaaagactgaagtccaggtcatrattcgttgtcttttgacagttttcactgttgatcgccttggttctcagattgtcgctagctagattgtagtcttctgctgaaatactgtcttagactaccatcaccatrttagtctggtctcactttctattttatctgtttactatgctttttcatattttgttcatgccactatatagtagttaatataytgcattataaatatgaagcaacaataaactgtgcaatgaggttttagcaatcatagttaatatcacaccatatttttattcaaaaagaagcatgatgctgrgtagattatgaatatttgtagcattataatctcagattgtaatgatcaattttttgaaaactgaatatctctcaattgtgtaagactcctggctcaatttctttgctatgttataacctttcctctgtgcattagactctttactagactgtggatggataagaaattttaaaaaagcaattttaaattaaggtttaatgtttctgtgctctttgaagtagcagccaccttccccacctctgccttctatagctctccttagcaagaatcctagaagccttccttggacatcctcttgtgtcaagcacatatactcttccccctcataagcacctcccacgccagcatgcatgctctcgtaatgtttgttccaccgttgttggtgccagcccaaactgtacagccatgccctgtctttcttgtctagtccttctttctctggtgcctaaatactgacctgaatgccctcttttgtgaagtgagggagggaggcaaagggtcaggggaagaggagtggaaggctggggatagcacaatgcatgcagtgcattcctccatctccagcacatatccctcacctccctctgcttgtgttgttctgggatcacagtgtgttggtgcctaagcaggctctgattactgtgattcccagttcatccacgactgcctcctcaagccatgatccccacatctgtagtgactcctcatgggtgttacttaactacatgaaaatgcctctttagttctatattcagggatttcctttaactcttctattcactgcagcttcttttccttcctttttttttcttttattatatcacattttattttatttttaattattatactttaagttctagggtacttgtgcacaacgtgcaggtttgttacatatgtatacatgtgccatgttkctgtgctgcacccattaactcgtcatttacattaggtatttctcctagtgctatccctccccctctccccactgcacgacaggccttgttgtgtgatgttccccaccctgtgtccaagtgttctcattgttcaattcccacctataagtgagaacatgtggtgtttggttttctgtccttgcaatagttttctcagaatgacggtttccagcttcatccatgtccctgcaaaggacatgaattcatccttttttatggctgcatagtattccatggtgtatatgtgccacattttcttcattcaatctatcattgatggacatttgggtttctttactccaaataagtctatctacttctcattttacggcatggtttttaaattaattctacctcagtgcttttttatgtaccattcatctcatcagaaatgtctatcttctgactgctgtaatctgtattcatcaactccttctgtacccaggaggagagaggaggcttttcagcttaattcaacatcatgctgatcattctattacttgggcaattctctagtcactaggggtatctcattacatgttcatgacatactttgttgctcttttgtttctatttcaaccataagcttgtaagtttgtgtaaattaaattcaaaatccccaaatatgtgattagaatgttattagaataatacggatattattagaatattattagaataatatggatattattagaatagaataaggtgctctttaaaaatrcactttctgaggctccccmccccagactcatggaaatgaaatctctaacatttaggctatgtaatctatatttttattttgtatttttaagcaggttctctaataaactttaatacaataaaatttctgagcttgtattgtgtaccatcaattcaaatatcatataagtgacattagttgagggtaacctgatttaggtacactcacctttctgtccaggcttgtaggtgggtttatcagtctgtacaaagaccacaytctctctggatctgattgccacagatctcctctcttccaggttgagagtggctcctttagcagaaaatgtaataaatgccagtgggtcagatctggcctgaggaacctagggaacaaataaatactccatgaaactgattttttgttaagaaatctctatcactgtgtgttggtatcactaaaagttttaattcataatttgtcatatctatttcttcaataaccaaccttgtttatttctcttgctttgtcacttccttatctcaccatttaaatggattcttttgcctttcttaaaacttcccttttctgcacaagagtcattctttctatatgtcttattcccttcaacarttttctatcataaaatcaaatgttttggctcttgcccttgttaccatttatgactgtacttaacatcatctcatactgaggactatattattcttttaaaaattaaaataactttacacatacagtcaaatagcctgatctctgtccctaaaaaatcagttatgtgggtggtgttcatgcacctgtaatattcttttctatattaagcagaaagaagtatttacctcaaagctgatgcatttgaagaaattttctccagtaacattttcttcaaatattttggtctggacctcaccatagttgagggagaccgtcaaaacaacagattcagtgagattaaaaagctgggcacaagctttatccaaagagccttcttgtagaacagaaggaatcagcagaacatactgcctacaaaattcaagcaagaccattacaattgaatgtgtgattagttacttagcaattattgtgttaattgaagaatttttgagtttaagagaagtatgttatttttaaatgttagaaatacatcaaatggctaaatctgtatgaaacagaaagatgttggcatatgaattaaatttttaaaagtcaaaaaggaaatcccaattaaaaatcagcaggtaatttgtcattagttctataaaggttaacatcatcagtgttcttgtacaatgcttttgcccccaaactgacacagcacattctgttttatatttgcctactgtttgtccagttccttccccagcagctgtcagacacctcttcctcaacataaatatagcactgttacagctcttactcagcattctggatatctacgaggcagagatgatgatgccaaccaaatttgaaatttactagtcccatgagcatattttgggttatattgtaaaatgataaaattatttaaaatcaaatcactgcaataaaaatgtaatgtttaattattattattattattatttatttttttttttctagacagagtctccctctgtcgcccaggctggagtgcccagtggcacgatcttgcctcactgcaacctccgcctcccaggtttaagcgattctccagtctcagactccagagtagctgggattacaggctcatgctaccacacccggctaatttttgtatttttagtaaagatggggtttcatttcactatgttggccaggctggtcttgaactcctgacctcaggtgatccgcccatctcagcctcccaaagtgctgggattgcaggcgtaagccactgtgcccagcctgaatttttaataccaagctctatttgccttccatgtgaaataataaactgtgtaatcactgacaagtttggagactgagaaagagacagatgaaagagaaaaacacccagatgtattatcttccacatcatgatccaatgagatgaagaaaaagtcaatatgccgtgtctgctagatccacatacaggtcagtgttctaggagcccagacgttctcactagtcagggaagccgagtatgggactatatatccatgcaggagattttgccagtatttcctgagtcattcttaaagtttaagtcatgtttaaattttagccatctcccagtgtgttacatgtcattaggtgtgttatctaatttacaaaacagtcttgcatcagcatttcctagacataatttacaatgcctatgagtgaaaatttcaagaacaaattaaatcccatttcagtaaattcaatcattgtaaattaatttgtatctcactattatttcttggttgagagctaaatctattttgagaactcagtaccaatttctggttggcaatgctctgtatagttattacaatggaagcaatgtaaaaataacaaaggcttaaggaarctctaattgaaaaaaaattaaatattaccatgtcttttttattactaattgttgatgttgtattttccatacgacatatttttatataaaagtatcctggtaggaaagtttattgaagcattactttttctttttttgcatttcattttcttcttttcctttaccaaaattattgccaggtattttgtgtttctttgtctttagagttttgactaaataagatgctcttagaagacaatcgcacgattgctgtgactttatcaagtatcacaaagtggtttcattgggctcagcctctgacattgcccttttactgaaaacagcaggaaatctatttaccaactgttttttcctaaaattcaagttaattatatcatatcctctttaaaaatccttaatggtccactattacctacaagataaattccaaactctttagaaaaaaaagtttcttaaggctcttatctacctatagcccccactgcttgcccacagacgttctgctttcttccctgaaaacaccagcaatgtgccacaccctttcatctctacatgtgtatttgtgggctcagtcttctgtctagaacctctctttatatgacttcctgtctaccaggtacatatatcctccttgttcttttgtgattcggttcaaactttcataattcccaagctgaagttagttgttgctgcttttagctcccataacacaggtactcatctctattacaggatgtcatgtcacactacaaatatttagtttttatgtaatacatgccacttggctgtgggaatctcagagatacagcctgcatgttttattcattgttgaatttccaatgggtggtatatgaatgcaagcacttcttgagtcaatcatgacttttagtcagtctcaggttttccatagaatcttgtgtctgtgtacaactaaccatattcttggggagcaaaataggagaatattaaccctcccaggaggagagcttctttccattcacttctttccattcaacccatcctatgctgcatttgaagtaagcactcttgactcccagacttttaaagcaaacccattattggggtgctagctttctatccagaggttttacacaggttttgtaatgcagtgagaagcagacgcatctttctgactaataatgtcttctgctggtttcccactgctatatattacagagaactagaaaagattaaagccagtatctgtatttagggtatggtcaacttaatgagrcattagcttttattttattgttactctattttcacataaccctttctaaaaagcctgttatcatgcacttctttacctatgaaattttggccaaatctaaagacaattgcccttaatcatttgactaagacaatggactttatgctttcaatctactccttcctctttatatcccagttggctaacagtctcagattagtgactacttgtgttgttctttgtgaaaagcaacacccaaacctacctctctttatgtttgcctgttactgattccttggggtttcgttaccccttgctacaacactcattccaaagtgtgaatctaaaatgatcacttactatttgaggaacacagtcaggcatgtacttacatatagagcatctttactaattaaaatgcaaaatataaatcataccaatagtagggcacatctggagatcaaatgctttctcagactttattaacccattacaatttagaaatccaaatctaacatcgataacaggaaagttaatataagaaatttccaaaagacaaattagtacaaatgtttgaatttgttgagtagaaggtggatcttgcagtgcacttatcttttataaggagaattaaattcatctttataaacacacatacaatctcatctatctgatttgattgaagaaatcataactattaaatatttgaataatacccctctgataaataaatatatgagcatactacactgacttgcacatatgagaattttctagattgccagttagcasctaaaatttggagtaaatgccctaaccttctatctgggactcatgtttagaattatgatttattttcttattccatggaattataatacatatggagtaattctattaatattatttatacttgcctccaactctctaagttacatctgacttaargtatgattgttcatttttttagattttcccccagatctcaaaagtgaactttgtacataaacattatccaaattgagagatagatataaatatagacctccctaatacaccttctaaatttggtaaaagtcttctaactgtttaaatgggaaacagtaagaataacagaacacatatacacatgaacacagacatacgtaagttttttacagtacaataacaatgttatttgcatacaggatacagagcagttgtttctaattctcagtctacgcatgggaaatccccttctactgtgggaaaagatttcatcatttactagacaagaaggatctcattcataaagttaarggtgtggagagagtgggaaaaatgatggtgtgggttgtctgttargcaaactgggaatgccgtttccagcatatgaaaaaaatccctctttattcacatacattccaatgttcacttcctcatcctgtaaagcagagatgtgtttcattacaactataaaagtgcaatgctgggctaaagcctccttaccattactacaaaaaaggattctaaacaaaatctaaatcaatgcttctaactttaagatcattgctctaatgttttaaaaaaatgcatctgggatgccttttattataattttttaacagcagcaatttattttatgaaattaaaaaaatgagttcagtaattgtcaaaataaaacacaagtaagacataagtccaagtctgagtatattgtgaatactttggaataatgttattaataaacattgtctgcttttatggcagtgaatattcatatatttaatataagaaaacattttatattcaagatgcctttccctacaatgcaaagtaactgaagtttataggtaatatatactattaaaaaataaaaattaatatatactcatgaaaagtaaaaagaaaaataagaaaaagaataaattatgcttccaagcttagtgaagatctattcactcttccaaagtcattttcagaatataacttctctcctgtgttttcaccacctttcttgcttcactttctttaaagtatgaatctttaggtagtattgatcatttttgatattaagaaaatacaaagcttctggaaataattcaaatcattttgcaacttttggctgtgatcactttgcaaagcatgcagtgtttcttcgtagccaattgatgaagggtttagggaaatttgccaggaacttaccatgagtcatgggacaaatgggaacccgtcattccctctgcaaaacctgttcttgagaagccctttgtycagagcctcagtaggcagctggttcataccaaccaatggtaagcaatgctcatctgttctctcccttaaggcctctctttgtgtraagacccacaagcataagtatctgtggtggggctgtgtcatgagggcaggctcacagtgctctcctctgagttaccactactgaacataatcagggtgtgtaaacttgttttatttggcattaaagccgttacaacaagttataaacatttccagagcttcttactagtggaagcagaggtagtctctcaggcagagtgtggttaggaccgaatgcactctgttgggaaaggcctgtggtaaatgcaacaccttggcacaagaaagttatacttttgttgtagtgtaaaccaaaaataaaattctaagccccccaaccaatagaatgaaccccttctgtcagccaaggacatcctacagtaaatctgaaacactagttcaggccatgataggagtgggaggtcagatgtatctgattacaccttccccctttggaatacaggcactgctgatcagcattaacatcaaaacagagagcttaagacaaaatactctttgtagcaataagacatcaacatgacagataacagggcctaaaagaaattgaagtattttaccctcaaatatatttctttcttttttttactcgaacatgatcattttttaaaaattttactttaacttctggtataatgtgcagaatgttcaggtttattgcataggtatatatgtgccatggtggtttgctgcacctatcaatctgccatccaggttttaagccccgcacccacaatatatttctttgacatattttgaaatggatctgcacagttgtcttttgtggggaaaatctacattctacagagaatcgccatccttttccaggtcattttcctgatccaggagagacttaactaagagtttggcacctttttaagtctgataagagacatttacaatctgttctctctgaagcctgctacgcagaggcttcatctgcataataagaatcttggtctccaaaacccgttatcttaacccagacacttcctcctatcgattccagctctttagataaactatgttaatcaagtgccaatcagaaaatctttgaatccacctaggacctggaagcacagttccctgccccctttgagstgtcctgcctttctagacctaaccaacgtgtaccwcaaatgtatcgattaatgtcgtatgtctccctaaaacatgtagattcaaactgtggcccaaccaccttgagcgcatgttctcaggatctcctggggctgtgtcttcatgggccatggtcatgcatatttggctcagaataactctctccaaatattttacagagtttgactcttttcatagacagtagctttcagaaaactacaattactcaacctgactttaaaatattaacatattaagaatttggtttgtgtgtaaaacattcattcctttccttgtaaggtagttacagagaargacaaaggccttggagcctcatggtgagtgtttggatcttggttctaccacttctcagatgatcaaccttggatgagttatttgaattccctgtgcttcccttcctttgtctatagatgggaataatcacaataccataccttataagcttgttgtggaaattgaacaagtaatatatttaaagtgattagaacagttactgacacagtaaacactgggtaagcctctacagagactaaatattacacccctaaccaccaaacacaccctacaaaattctagtcataaagagcattagtatgaacaatggattactcatgtcagccaagcgctctccaaaatgattttcctgaaatcaatatagaaacaactaaaaagaaatgagatgtcgtaagttctatataatgatgctatagaataaaggaggaaaggaattgaaaaagaaaagtaagaacatctttgtcaggtgcaagtaacagaatacctaaacagacttytaaaaaatcaaacatttataatctcatttggcacaaatcctgagaatggaggactggcattggttcagcagctcatgcatgccatcaaacagtttcctaaattctttccaccctacttccttgatgtgtcagtattatttgcaattttggctcctgacgtagcaaagattattccttcccagcaatatctcaatctgaatgaaaagagtgagcaggaaaaaattttcttctcctacatctctcttttcttttcttttctcttctctccttctttctccttctcctcctcctccaccttctctctttcccttttcctgccccccacctcttttacaaactattgcagatgctatattaggaaattttcctgtatagctccttatccacgcctggtttatatctctcattgctaggccaaagtagtgaacgctgtggtgtaccctctagataatccccttcatggcagaggcacttatgaccctagctgctaggaatgttggtggctgttggctgtcagatgaattcacctctgagaacctccctcagcatcagagaaacatttcacccaggttcctcttcctttctaggggcagctcagtgcacaataatgggtactatgtgtgtataaatgcacagctctgttgccttaaattaggacaactctgaacaatcaccccaaccccacagctccccacgggatatactgataactttattgtgactgccttgtagtacagctcctttttctgtacaatcctgcttccttcatcctctacaggtgttgatctttagaattctctccaataaaccctcttcccacaaatcttcatctcagagtctccgttttgtggaacctgatctgtggattccaatcactgtaagaggggactgtgataatatgattgacttaaaaaacaaaatcatgattcatctgagagcacttgaggcctgagcaaaatacacattctctaaacttacaaagaagaggaaaatctcatgtgtgagcaaccacaaacagagaaaagtggattgttcaagacactttgactattgcattgtgttggaaggatgggaaggagagaacagaaagttgtgagcaggataaaaatactaaaatgtcattctttggtacagtaaaaagaaaatgagagctcccaaagatcagtgaacagcaagaacaattatgatattaacatgggcagagtttcctaaaagaagaatccagagatggtctaagcagtgcttctcaaactttaatttgtacatacccaatctgaggatgatcttgttaacatgtggattctggttcagcatatgtgggtaggacctgacattctgcattcatttccaacagcctcccagcaatgcaagtactgctactcttctgaccacacttagagtagcaaggctctggagcctttgaaccccagttcaccattacctatggctggggaagcttggaataaccctgatgtccaagctatgcccttagatcaagggatttaaattgtggtcttggggctagtagtgccagtatcamttgggatcctcttaaaaatacaagttcttccatggtgtatatgtgtcacattttcttaatccagtctatcatttttggacaccgtggaatactatgcagccataaaaaatgatgagttcatgtcctttgtagggacacggatgaagatggaaaccatcattctcagcaaactatcacaaggacaaaaaaacaaacaccgcatgttctcactcataggtgggcattgaacaatgagaacacatggacacgggaaggggaacatcacacaccggggcctgttgtggggttgggggaggggggagggatagcattaggagatatacctaatgtaaatgacgagttaatgggtgcagcacaccaacatggcacacgtatacatatgtaacaaacctgcatgttgtgcacatgtaccctagaacttaaagtataatatatatatacaagttcttgtgcttcagccagacctattgagtcagaattccaggaatgagcctcagcaatctcaccatctgggtgattctgacacacagtagagtttgagaaccactgccttgcttcggcaatcctattaagttggtcgaagtgagacgtcacattaaaaacaaacaaacaaaaaaacctaggctcctagcatgttcaaggaaactccacccaagaaaaatgtgaccttctagtacacttgtgctagaggtttaaaagaacaaatccagcttattttggcatatgctgtcccttatgggatgaaagaaatgggtaactttttttctgcctaagtaagtaaatgatcaatttacagtcctcaatttccttgacacacttgcagcactggacactgttgactactcctttttccctgacagtttttgacctggcttccaggagaccacactgttttggtcttcctctgacttcactggtttctctcttacccagtctccttggctgatttcttcgcaatctgcttcctcccaacctccacatattcaagagcttcacagaaaaggcccaaattctcttccctattcagactcactgcctgagtaatctcttcccatcccacagtctatgtgctcacaattccacaatgtatatattttttttagctcagagctctctctttctctcaaactcctatactgattgtccagcctccaacctgatgtctccacttaagtatataaaatcaaaagctcaaagatgaattattaatcttctaccccaaacctatgtcagccatggcatagctcaggtaatggcaattctttccatagaattagctcaggccaacagcatgggaataatctctgatcactttttttttctcattccttgtatccagtccatcaggaaatcatactggttttactttcaaaatatacctagagtctattgcttcttaccagcttctcccctgctacaaccctggtccaagccacaatcaccttttgcctggattattttcacaacctccacgaggtctcctcacttctactcctgcactcctacagcctatactcaacacagcagctagctgattattttaaaacataatcagatcaggtcactgctctatccaaaaccctgcaaatcattcccagttttgctcagagtgaaatctaaagccctaacaatgacccttgatccccttcctggtttggtgccccaacatgtttcttatctctctacctactactgtatgcacctctttgctccgtctgctctagtgccatgctaacttaattgttgtttcttgaacacacaagacacactttaactttatgggccttgtttttttctagctgatctcactgccaggcctagattttccttagatgtctatgtggccaactccataacctccgtcaagactttgcccaaatgtcgttgcctcaatgatatcaatcctaagccttgtgtttagctttccagtcttctcacctcccagagtgttctatatcctcctgcccttctcttcattttatattttccatagcacttatagcctcttaatttcctagactttgcttacccattatgttcattattatgtttgcgyatttcgtttgattgtattatacgtattgtttgtctcccccattagaatgcaagcaccacaagggcagctgtttttactattttcatgcattgatatttcccaaacaccaggaagagtatttggcaactatcagcattcaagactggaggtctgaactaaagcagcatggcagtgctggataaaatcatgtaggtctatgagtcattcaggaggtagatcaacaattgtcaattatcaacactgagagaaaatgagatgagagagagaaggaggtaaatttgacccttaggtgatgggtgatgatattgtcacacacygaagmggggatctaagttggagaaactggtttggagtagattatggatcctattgaagtgcctgtgggacattcagttaaagaagcaccttaggcagtgggatatgtggaactgaagtgtgaatatagaggcatatatttgggatacacaaaaatacagacagtaactgaaatgcaggatatttaatgtgtatagtgagaagagaagagggtttgcaatagaatcataaaaaaattatttaatagtaagagaaagtgaggtcaaaatgaagatcattaaatatccagaaagtgagaaggaaaatgtgattattatgggaatataatccatctctctaggatatggatataatccatctttaggatatggattatatgtgatggtggaaggaaaagaaaacaataaacagaaagaggctgaggataaagaagagaaagacaataaaattgatggaatgagaaggtggcgaaacaggatgagatttctagaacatagcaaaggagatgttagtgttaagggtttcagctactcattaaatatatatatctacatttatatatacacacatacatatatacacatatatgtgtatatatatgggcatatgcatgtatacgtatgcacatacacacatacatatgtgtatacacatgtgcacctatctgtacacatacatatattcacatgtacatgtgtatacatgtgtatgtgtatgtatacttacatatactatatgtgtgtatgtgcatgtatacatacatatacacatatatacacccatgtatatatgtatatacatacacatattgtaggtatatatgtgtatacatgtatgtatgtatatacatatatatacacacaaagtttatttcaaattgcaaaaaagtatgtgattactgtataagaaaatgatagagacagttaattattattcccattgttcaaagtacttttgcatggagcaggaatggtggacataaaagtgccatgtgatgcttcaatagcacaaaccttctccaaatcagagctatacagcctccatgaaatattccgtggtagtctagtttactgaagacctcttcttaaacacacacactcacacatacacaatcacatgaatataatcacatcaaagcttggcactttccattcaacactcctgaattaaaatgttcattatttactataaaaatctggacacggaaaatgacttcagtactctgttcaaaaagaaactggggaaaggttttattgaaaagggcaagggccgggcayggtgactcacgcctgtaatcccagcactttgggaggccgaggcgggcggatcacaaggtcaggagatcgagaccatcctggctaatgtggtgaaaccccgtatctactaaaaaaatataaaaaattagctgggcatggtggcgggcacctgtagtcccagctactcgggaggctgagggcaggagaatggcatgaacccgggaggcagagcttgcagtgagccgagatcgcgccactgcactccagcctgggcgacagagcgagactctgtctcaaaaaaaaaaaagaaaaaaaaaaaagaaaagggcgagtaagagagctgtattgttcatctacccacatctattctttagatggtatttttctctcagttccttaataccttacatactcattgtgacactgagaattttccaccataaaccttaaatccaagactttttctttgcctttagttataccaaatagctgacttcattatgccttccttgcttgcttataatttgaggagcaattttattatgtaatcaggttaactactaaatacataagtaaaatggggactgaaaatttattatttacttagaaaaaaaaggtttcccataaaggggtgttatgtaccacaaagtacactcccttcattttccttgaacctttatcacaaattgtactagaagagtcactcacattttcctgaagtggagtctctgaaaatccacagggcctagggtactttaagaatatataagtcagtctgagtatggtggtttatgcctgtaatcccagcactttgggaagccaaggcaggggggttgtttgagtctaggagatagggccagctgggcaacacagtgagaccccgtctctacaaaaaatacaaaaatcagctgagtgtggtggtgaacacctgtagtcccagctactcaggaggctggggtgggaggattgcttgagcctgggaggcagaggttgcagtgagccgtgagtgtgccactgcattccagcctgggcaaaagtgcaagactctctctttctttctttctttctttctttctttctttctttctttctttctttctttctttctttctttctttcttcctctctctctctctctctctctctctctctctctctatatatatatatatatatatatagagagagagagagagagagagagagagagactgtcagtatatctagctggactgtcagtatatctatatatttgtcaataaaatttattctcttatcctataacaacacagcttccatcccagttcctggggattgggggataagcccaaatgacaggaacagcgtgtattatcagggttctccagaaggacagaactaataggattgatgtatatataaaggggagattattaaagagtattgactcacacaatcacaatgtgaaatgccacaataggctgtctgcaagctgaggagcaaggaagccaagtctgagtcctaaaacctcaaaagtagggaagccagcagtgcggccttcagtctgcagccgaaagcccaagagcccctggcaaaccactggtttaagtccaagagtccaaaagctgaaaaacttggagtctgatgtttgagggcaggaagcatccagcacaaaagatgaaggctggaagactcagcaagccagctccttccaccgtcttctgcctgctttttctagctggctggtagctggttggatggtgcccacccacattgtgggtaggtcttcctgagggtgggtcttcctctccctgtccactgactcaaatattaatctcttctggcaacacccagaaatgctcagatacacccagaaacaataattagcatccttcaatccaatcaagttgacacttaatattaaccatcgcagggcagaatttcagccagtgtggagcccatagagtgtgctgcaggagtgtctgtaatggagcatggccagggtcccccacactcctaggctttacttgctcccataggagactttagccttagggaaagtattagacccgaaccctgcggggcagtcttgaaaatgagatgaggtcagtccaacctgagcatccctttgtctgctggcctcttctggggcccagactggttgcacttgcttgcagtgcagcccccaagtacctccygggagccttcattatagctcctgagctggtggacttcacctgaccaatacagtgctccaacagagcagccctcatggacatgtactagcctgcccgttccctcccaagtgcagcctctcccataccattttgctgatatacactcacccatgatcacccctgactttgcyttgtttgcattcctcccccaccaatgtgcatgtgcacacgcaccctagcatgccactactgctggcatgagtgcacatcacgcccctcctccctgccacactgccactgtcattgaagtgtttgcaggcagagggcccaccagcccagctcctgctagtgccttgctcctgtgcccgtgccaacactgttgctgacgtaacactagccatggagaacagcagactcacccctgccctgagtggccactgccatccacatgaatgtgcagagggcacacatggtcctgcacccaccagtcccctatccccatgctaacatcacaatcggcatgaaagcatacagtcaccagcaggggccccctgtcccatagaattgtgctgccactactgctgctgggaacacctgcacagaggctggcacctcagcacctgctagtaccttgctgaagctgacaagcatgcaccccacctcactgctgctgctgcttctggtggcatgtgtgagctgctgctgctggtggcatgtgtgaatgaggaggaatcctgctgccactgcactgcagaatgctttggctggcaccacccatcagaatgctgtgaccagcagtctgggagcaccttggtccctccagcacatcaggttcctaaccttgaggagccagggaacaaagtcaggacctgagacctgtccctttgcactagtgcatgcagttcaggagtcctgagctgagccttggccttctaatatcttccagaaatgaagccagtaaatcaaacccaccttataccacaatcaaacccccaaagtcatcaaatagaataaaaggaacaaaatcccattcaaaggacaacaacttcaaagactgaaggaatatcagcctataaaaatgagaaagaaccagcatgagaactatgacaactcaaaaagccagaatgtcttctttcctccaratgactgcattagctttccagcaagagttcttaatcaggctgatatggctgaaatgacagaaatagaattcagaaatatggataggaatgaagatcactgagattcaggagaacgttgaaactgaacctaaggaagctaagaatcacaataaaaggatacaggaactgacagacaatatagccagtatagaaaaaaatgtaaccaaccgaatagacctgaaaatgctttaaaagaatctcataatgtaattgcaagtattaacaacagaatagaccaagctgaggaaagaactcagagcttggagactggctttctgaataagacagtcaagaagaataaggaaaagagaatgaaaagaaatgaacaaaacccctgagaaatatgggattatgtaaagagaccaaatctatgacttgtttgcattaatgaaaaggattaggagaatggaagcaacttagaaaacatatttcaggatatcattcatgagaacttccacaagctagctagagaggccaactttcaaaatcaggaaatgcacagacccctgaaaaatacttcacaagaagatcatccctaagacacatggtcgtcgactctccaaggtcaaaataatctgtacaatgcgtccttcactttcttcctttcctccccacccctcactgttcaacagataacctgagtgcattcagtttgtaaagcacagtgctggggccgtgaaagccagagaygaatcagacaacacacaaccactctcaaagagattcagggatcccaggagggaagaaaggaacatcagtaagcacaacrccccgcaagcctgggtttcacatctgtttagcagcagcatgaccttaaggaggtcactaacaggtcaacgcctcagcttcttccactgaaaaacaggaatggtcacttctgcgtcactgaattacctctcactgaattacctcgaaggtgaaaaggagctggtgatgtctggtgctcctgtcctggctgacacagctaggtcctcagcattggctattattgcctgcaagacggggagyagtgaggggcttcaggcactcaggaaacccagaactcccacaagtgggcagggcaaagtaggcraaatttcagggaggaggcggtctagagcagatcacctggagagggaagctccaggcttaggagacagacactctgcaagagaacgccacggaggacgaaacagcagagcaacagcaagcagcgcctctggctggagctgtgcctttcaaggagccgcagtaggaaccacgctcctcttggggtggcagagggatgggcaggaccatgcttgggctccctgttccaccgcctccaaagacgacatccccattccccatgagaatgtttcctatgaagccaggctggcccttgacctctgcagggctgccactgrccctggcccatcatcatgccagtccctagaggctgatggtgagaagggagcagaaagcgcccactcctgacccagattcgctgcttctcctcccctgcctctgtcatgaccccagggaagcaaaccctgaaccggggctctcgccttcacctttaccttctccattctgggataaaagaccacacattggatgtagtgtacactgctccccaaaaccattgaaataaaaaataaagaatgatctgctcattatgcaggccacttgggggccaccagatgccaatgagtagaaggagagagaaggacagatggaggaagtaaggacaaggggaaaggggaagggagaaagggagaagaaaggaaggggagtggggaaagaaggagaaagagagggaggaaaggaccaagagccttgcagagaaaattccccctttttctaaggaaaggtgctgggcagtggtgcagcttcttgggtgaagatgttgggcaggggctgacgggaaaaggcagataacagcatccaaacttccacacacgaagtctgtcccctcctcttccccgtgccgtctcaacaacccccatcccccgccctgccttgtcatctatatcttgggaagcaggtgacatatctggcccaatattttggggcctagcttctcccaggtgtggagggggcagatgcagggacaggaagaagcggctgggaggggctggagggtggggctgaagagagcctgggaggtgcttgtcattccctccagtctctgcaagctcccccactgcgacagagcaggaggagagagcatagccaggaatgctaatttgccaggagctcacctgcctgcgtcacaaggcacaggtgccaatgaggccagggtccagtctggggcatgagatggggtggtggggaggagagagacagtctctcctctacccacctgtctcttctgtgcaggtggtttccgagcaggtgaagcacatktaaagggggaggttctaaactggtcacagtcccattgaaaaagcccatgggaaatgaaaagcccacacactcgcccattccattgccacaggmagggggcaggtggaggaggagcggtgggtgctccccacaccactcccaattatcaccgactcctccctttccttcattctccttcccaatctgtcagtgtatcctgtggttggtccctttgaatgtctcacccagccctccttgcttgcaagtcccctgattgcagcctcatccccgccatgtcctgactacagcaacagcctctgggtgtctctgccatctgctctctctctcccttcttgtcccctttgtgacaggtgcttgatgaaccttccccaaactcttctgacccatccctgccctgctcaggacccaatcacagttccctcaccctcctgaatcaaacctgaagtcctgtcctgagtaccccatgggccttaactyactcatcccaacttcactcattgccttgccccacaccctgccagggagcctcccatggcaccgtggaggacgcagaggaaccaaggcaaagctcctgtggcaccatccagagagaccaggcccacaggcatgtggaaagtcagcctccaaccccctgctctgcagggaaggagctgagtgcaagggagaggcagcgctgtctgtgcttcccgtgcagaagtcccagccccagcccctgtgcaggccggcctccccggcagcctgtcatactccgagttcccagccactttcaggcttctctccaagcctgtggcctccatttctagaccccaccccgggacctgcacaccagcctcgctaccttagccccctcctccaggagcctgccctgtgtggagtaggcacatggttttcctctccagcacccattkcctccttactcaagcaatggccctgtttcctctggggaatccatctcarttcatgagcatcagatcagactgcccccagagctcctcagtctaagccaatcagtgtgtcatagtccccagcctcagtgatggattctgggacagacacgaggaccaagccaggtgggatgagtgagtgtggcttctggaggaagtggggacaaaggagagcattctttcctgccagacctaaccctgggtcatgagtccagccccactggttgtcacctcrccaccacgagagcaaggcctgtctgggaatgtagccagcccaaaagaagcaagctgacatggaaggaaagcaaaccaggcctggatgacgtcgtgtaagccctggaactccgaagcctgctctactgattagttactttttgctcaacctggtctggagagttccgactgacaggrtgccaccaatttttagtgatttctctcccctctagacccctggaagcctgtgygattcatgctatgcaatgaagaatcagcctcgccctgtgctctcccattccrgcctctaagctcctaaggacaccgtgttggccacatctttggtgtctctcagggtccagcacaatggggagcacacggtgggagayggatgtggtgacctggaactcaggtgtgagggagctgggacacaggcccaggattcctgagagacatcctcccctccctgggccrtgcgagccacttggagaacctgcacccactctcaacgaactcagcactcccttccccaggatatgccttcctgccttctcctcatcccatccctgggcaggggacatgcaactgtctacaggtgcctagtaccaggatgggaaaggaaagccaccaaaatctaaggctgccctcagagaagggcaagcatgcagtcctcatcttgatgaggaaasagtttctgagggaatagttttcccctccattccaagcgttggacatgaggcggccataatcaggggctgatggctcttaaagacttccgtcctcttgccgaggcatcccttgggcacatttagcataacaataagcacaaaggagygtccaacactttctgtaactgttggtagcaagttgatgaatggccaccattcaatgggcagtcaacgagtagagattatcaacaggcaagagctagcatttcctgaaggcttcctaggtgccaggcactgttccattcctttgcatgttttaatttatgtaatctttgcaacagttctatcaggaagatgccatgattaccacagtttcacagatgaggacattgaggcttagagggattgagtaagttgccaagggaacagagcaagcaaacagggaagccagatttgagccaaggcatcagctccaaggcaacctctcagccagttcagtgcaaagcctcttgtttacagggactttctagacaggcttgaagcaggccagtgagtcagtgggcaggggagaggcagaatagttaagaggatctggaggcaatgactatgcttcatcccccattttttagtttgggagggcttccaggaagaggtgggcttccagttcatgacagaagaggaggctgcacagtgaaggagcagggactccaggtctggtgacaatcaggtgtgggccagggtgagggtggcttgcatcaggagagggatctgagtcaggcagtcacatacttcgtgctggggtccctcaagaggcacagcctgaggtcccgggaagaagaccaagcctcatttcaggttgcttgcggccaaagacaggacctgtgtacccaacaacccctgggacctttgcaggaaacagcaaacactattcactcactcgagttagataaacactgagtgaaaagtcactggagccaaaggactgtgcggggtcagcgctgccgatacaagaactgcagccctccagctcggcttcctcaacggcctctctgcgctgcagccacactggcctcctttcaggtcctccacctcagggctgtaggtcatgtgcttccttctttctggaatgttctccctgacctacccactcaccctcaggttttaccacaaatgctatttcctcacatccaccttccctgacccagccagrccccccatsatgagcctcgcagawcctcatctcccctccacagaggtgatcataacccacagaacccagggccacgatccctggctttgaaccctggctctgccactcagctaagtctctgtctttctgtgcctcggtttcctcatctataaaatggagataacagcagtgcctgctcataaaatgtggtgagggttaaatgagttaaggcactcagatcaatggtggagcatggttaatgctatatgcatattagtgaatattataaataggctttatcacaactgtaactaaacaactgctcatgcattggttatttaggtctgtctctcctgccagaatatgcactccagttggacagggacgctgccttattcatcactggatctatagagatttgctcagtgcctcgctcacagtcactgttgggtaaatattttctggctgcaggaaagagtgaaggactagccccctcgccgtgggaggaagagggtgagttgggagagcagagccaccacaggaaaccagggggcaaagtggggtggaaggcagtgagctctcaggctctcaggagcaaaagcttccaagctgggctctcaccttggcccctcccacccagggaagacagctgggtcttccaggaccaggaatccccaaaggggctgctcccagagggtgtattgctgggactggagagaggactgcccagaaccaccccctctgatcaggtgggggtgggtggcagctcccacctactgaagatgtctctggagaccttctgcaggcactgccaggcatctgccacctgccggacggtctcctctcactgcaggtctggtgggatgacgggcaaggcataggtctgacctgccagggaatgctgggtcctcgcaggagtcgtggtgcctgtgggtagcatcagagccacccacgcccaccggcacccactcaccacaggtagcatggtgttgagacagcacagccctcatcccaactgtgtgcacagcttcggggaggtggggagggggatgggagacaaagcatttggtgggaggccaggagctcataggagatgggattctgctgatgcctgctgagtgaatgagggagggagggggcaggacaagggactggggatttggtagggacaatggaggagctcggagaagaggcaacatttcttcaayccttataaggtgctgggtacctgccaggaaccctgtccatacacgatctcagttcagctcctcaccttgggtacacaagaaaggatcccyggctgaagagggaaatagaggctggaaacaggggtacatgggcagggtggtggtggtgagagaattgcccgaatcagctgccaaatggtgcccaggttggaaacgcaaatgtgcacacatgggttcttcccactctaaccctgaggaattcgaggcctgcttctgacacagactgggcagtggctagtgactctaggtatagagtgtccagaccctgctcacccaggctagagcttagggagccagaaggaaggaggtgcatgtgggggtgcgggacaggagggaaaaacactccttaaattgcaaagtgagggcagaatctatttacattgggttgaattaactcctccccttgatgccactaaagcaggaatcacactgcagatggcactgatttgattggcaagagacatgccaggaagaatattaagggaccaggcccctataattaggcctaatcgtagcctgttgtttgaaaagggtatgaaggacattcatcaggcttggcackgtgccctagacctgctctcctggktagtggggccctccattgcaacagaggtgtgggtgggcctgggagagtgtggcaagaaatgcttaggaggctctacttggccttaaagggctgtgtgaccttgggtaaattgccttctttgaatctctggtcctttccatttcccattctccaggctaagarctgcactctgatacacggttattcccaataataataaccatccaccccgtgcagtggtcataaaccagagagagaaatgtccacatgaaactakgtgctgcatgctggccatcactcatggatcattaatgaaaactracttggaatcactattttaaggacaggatggyggggaggcatgcttgtaaacagagcccttggcgactcaattcatctgcaactcatttttcatatatgttaaatgtatcccttcaagatcattgcaaagaaaaactaagttaacataagaaacagtgcctggtggctagtgaacattctacaggtgttggatgctgttgtcatcattgtyatcattatcagaatggacaagacagaaccccacagtcattcatttcagctctctttttggtgaagaaatgtgttgagcatttagctggaaacctggcacttaggcacaaggttggtgtagaaggcacctgcagacctgacccaggcgcaaggctaggcacccttgtccagttctctgctgacttacaggcagttctccctcactgctcctcacctccagaataaggagactccttcagctttgaagatgtgggaagagcaggggtgagggcaaggaagaggrtgtctgagcrttgaaaaggcyragaaaagaggctggagccctgaaggcaatcagcacctgttcccaagaatgcaaggctgggccttctcccctctcagacacatccatcatctgtcaagatcagccactcagagccctcaaccttgccccctcctccttcagaccccatggtacactcacaccaaggagggtgtcacagtgcaggggtttcatccccagggcagctcattgctgggaaggccacagcacccagctccctctgctgccagattccaggccctgtggacagcatgtgtcacacagcaggtgcacactkactgtcatctcccttccttagtcctggaggtggtctctgctgtggctctgcatgccaccaatgctctctgaccatctctaacggcagcctttgatctcaaaaatgccccagcctctaagtaacccatggcagtatgaagccaacaatgaggaatttcttccgagctctcycctggagatggggtggcrggagggcatgcctgcgactgagataactcccaaagcacagcrgggaaggaagaggagaacaatgaggaagaaagggagctgagaagggaggggaagcagacaggagatgaggcggtgcatggaagagagcctggtgccacccccataggctaccctatcacctcagtccctcccagcatccaaggcccttcctcagggctgctgtgcctatcacggccactaacctggctgctccctgagcctggcagccaacaatcacacagaagaagtccaagagcccagctctgcacaccttcagcactcctgtcacagcagcgggaaagggttctggtgtcatggacctggtgccttgagccaacctgggatgggcaatgtctgtggccactaagaagctgacctcagcatggtccggctgggactagaatgggagcagagacggggcttctcgagtctatctgtgcggtgggaaggtcttcctgtgtgtgtggctgcaggtggatctaggaaagggggataaaggccctgccttcagggcaccccaactctactggggagactcactctgacacatgaagcacaccagacatccaagaggcacatgaaatggtgagacatgacgggtgaatacaaaaagccaggaactccattctggaaaaacaggactgatggcattggatcaagtctgcaaaatcacaaaggacaataaagagaactgacacagacctgaaacaggaccccaggcatcccttgaagctcaaaagaatgatctaaggacaaataaacggcagttgagttttacacaacgggcaaaggcaaggagttccttaccgtggggatgacacaggataaaacatggctgagaccaggagaactcagataaactcgtgggagaaccacaatgtgctgtggaggggagcaggcatgcgggtacactcctgacctccacagacggcccctaccaccargcctgatggagctgcctacctagcatgggtaggcctcattccttcagagaaatggaagaaattttaatttctttaaaataaaatcctttaattttaagagacttaaaatgaaaacctttaagccagccctgcccttgtgtgtgctgagttccagaaccaggcactgccagtgagcagcagagggaatgcacctgcctaggctggaggggagcagggcctgggggtgtgggtggtgtttgctattcttcccaggatcactgagcacctaggtgagctgagctaccggagtccttggaaagacccagtgcccttcttcttagggtcaagaaggaaggcacaaagagggagagaggctcagcagaagaggyccctaagctcccaaggcaggctgctggatgctgagagatgaggccaggtcaactgccctaggaggggaaggggaggggagagccctggcaaggaagcccccaaggctactgactccacaggaatcatctcctgagcctggctggggtggtgtgagcctagtgaaccacacgcgctcctttctytgctactccagcaggaactggccgctgtgaaccctcttcccacattagccggctctcacactgtgactaaagagaccagccaccacatggtcccrgttacaggggcrgctggggccttgccatctggcaggacctgctgccactggcgctcgctgtctgtgagcacagggtctggtgggcaggaggtgactggagggcatgtcttcccaaaggagagctcgccaggccactcctcagaggccccagcccacaccaccagctgcctctgctcctcccaactgtgcacctcgtgccatcgagggagggctgggacccagctccagggctgcggctggcagagaaggacctggcctcctgcccactgggacagagaggtagcgggtgggaattctaccttcctcacctcccgagatgtccacaggctttggggaaatggttgaggggctttggaagttcagggaaagaaaaggaggcccaggaagaggatgaggccagcctggacttgttcatccacagggaccagggtccatgtggctgacagtctcttggggaggggacgggactctgggtcaagaagcctaagtcatagacatagtcatctccctgcctctgcgcagactgctggggtcaaaaacagcatcacgtaagcaccctccaccttggagtgcactgtttggggcaaggtgcccccagacaggccctgttgctaacacttacacccagcagttccgatggacaagctgtaaggacagcctcgccccaggtgccaggcaccagagaacttacaactgacagccaaggccagctggtaagcccttggttcccagcgagagagcctgtgagcacagtggagcctcaggacagcacgatcagagctggcttctcaaaggcggtgcccttgagctcagtcacytctcgcccctytgccgcccattgctggcacctggcttgggctctccgtctgcccaacagctcayttcagaggaaacaggaaaccaacggggmcttcgctgccctcctcagccaaacccatgcaaggccagcccatggaaagggagccagggagggtgagagtggaggggcagaggcctggctgcttctcctgctgtgatctgggcacacactaagctgcttagmcaacagctctatctcctgggctcagggctcagccatgtgaggaggaagggatcagtrcagccctgaggaagagtgaggrcctcaagtcagccagagctggtgccccacaaactgctgtggaacgcgagcaacttacttaactactctgagcccccttatgtgcaaaataggaacaacaaacaggagctcccacctcctggggttgtatcggaaattcagtgaggtggtaaagcaccccgctccacgcctggcctatgagagatgctccacaaacggtggctgtgatggcagtggggtcaccaccacatgatggctgagcccagcagacaataagacatggaaatcaaccactgygcagccactcgcaacaaggaagaaggtggaaaagctcatgagaaacaaacatccttatgacaggcttgcagggacgcctctgtattcagttatttttttctgctttggtttttgtgtttgtttgtttgtttgtttgatttcctgagatggagttttgctcttgttgtccaggctggagtgcagtggcacaatctcggctcaccacaacctccgcctcccaggttcaagcgattatcctgcctcagcctcccaagtagctgggattacaggatrcchggctaattttgtatttttagtagatatggggtttctccatgttggtcaggctggtctcgaactcccracctcaggttatccacccgcctcagcctcccaaagtgctgggattacaggtgtgagccaccatgcccggcctctgctttggtttttaagactcaacaatgatagcctccttcattcccccaaatataccacccacaccccagctttctcaggctgattcagaggctgtgctacgaggcctctggggacccagttctccacagaactcctggctgaataccctgcctcagagtccctctaggacaggcccacacttcacttctgcgcaattgggaatgtgcgtgaggtacgggtgcggccgccatagaaggaaaggccccgggcctgggtcaagcccagcgactactggagccccttgttcgtctgttacatcctctgctggcaggcaaaggggaaagaaaactcctggccatcggggcacccagattctactctgggctctttccagaactggccatgggagcttgggcaggctgtgtcgcatgtctaggctgttgctccttatctgcagaatgggagccgtgctcactggtggatggaggaggggacaggggacagactgggtggcatcccagggctccaggcattggacagaaggcatgtccagggcctgggccatgcccaaaacaacctagagcagggcaagtggcagagcccctcccaggctgctggcaagggccccctggccctaaagcagcccatcctcatcccaccccggctagtgactttgaaagagcagcttctagatgctcagccaactacacacaaaggcttctccctactgggaacaaagtaagaataacgccaccctcacgggaccaaggaagctctgagaggggatccatgaagccagcctcgggaaccagaggaggcaggggggcggcgagagggctgggcagcagaatgttggctcgcctgattagctgaccccacccagaagaagacggaggattctagttctttaagggaactggcagacttcttctctaggagccctctacctcctgggccccaactctgaagcagctgcctggcagagacagtgaggagggtgcagggagaggactttgycctccactgctctccagccaggacacggccccrgctggcagcctttcattctatactgagccaagagacacacaccagagccccaggctggccatgccccaccgcctctccagccccactgggcacactggtaagkctggggcctctgcccacagtcagggcctatcgtggcctggagcccacacctacyacmctgactacagcrggactgagggcactcatggtatctcatggaaaacaaactgaggcccaggaggaaaatgtttgtttaaaattttgcacgccatttctccagggccactaagccaggtccacttactttgattactctttagtgctctccttccagccatatgaggaaaacatatatgttttcaaaacttaggaaaatactgtattctatttttcctcacttgaaattacatggacacacctgcaactgtatgtgttttttaaaactccaagaactgtacaccaaaaagagcaaacttaaagctgrgagttgtggctcacgcctataatcccagcactttgggaggctgaggtgggtgagtcgcttaagcccaggagtctgagacaagtctggacaacatggcgaaacctgtctctacaaaaaccacaaaaattagctaggcatgttggtgcgcacctgtaatcccagctactggggaggctgaggcttgagtccaggagattaaagctacagtgagctgagatggtgccactgcacctccagcccgggcaacagagccagaccctgtctcaaaaaataaattaataaataaataaaaagagaaaactttaaggcatgtatgttggtaatacaatacataattatacatatatacatagtatgtaaacttcacagtgcattgagaacattttccctgtgtcatttaatagtttcccaaacccactcatccatgcacataccatactttatttaaaatgttcccctaatgggccaggtgcaatggctcatgcctgtaatcccagcactttgggaggccaaggtgggtggatcacatggtcaggagttcaagactagcctggccaacatggtgaaaccccatgcctactaaaaatacaaaaattagctgggcatgctggcatgcacatgtaatcctagctactcaagaggctgaggcaggagaattgcttgaacctgggaggcagaggttgcagtgagctgagatcacacaattgcatgttaacctggcaacatagtgagactctgtcccaaaaaataaaaagtaaataaataaaatgttcccataatgtaagaaatttaaattgtttttgattttcctttattataaattgctctttaatgagcactctaacacataagatatttgatagcttttcttattattttcttaatatggagttttagaagtgcagttactggtccaaagatatgcctttagtrcccttagccttagttcttaaggcttgtagtaccctttgcaaagaggcttttctcaaaggttttgacacgctatactccaccagtgctggagtagagggctgcatcatgttagcagttatcagcttaaaaatctgtgcacatttggaaggcaagatggcatgcacctgtagtcccagctactagggaggctgaggcagaagaatcacttgaggccagaaatttgagcctgcagtagctatgattgcaccactgcactccagcctgagcaacaaggtgagatcctatctctataaaaaaaagaataataataaagaaaaaagaaaggcaaaaagtagtatactattgttgccataatttggatttctttgattactagtgatgttctgcattccttctcatgtttattgattgctaatatttcatgtacaaacctagttacagcamcaaccagcaagccayaactctcaaacatccttgccatcttagtgccattgctgtaatatataaaacacacattaaaccacagcagttaatattgtgctcgtggttaataccacagtgcagtagagacaggctggcatagcgtgagaagcagaggttccaagccagacagccctgggtttaaatgtctcctccctcatggaccagccatgtgaccttggcaaagtaactkaaccgctcttaccttgggtgtcatctgctgtggagctataaaatgaaacartcatcacttccttccagggccccatgagaatcaggtgaggatgacacaggggaggcaggtacacacggccacacacccgaggggactcagcagggggcagtaatgaccacaggggacactactaaagggctgagtatgcagagctcccatcccggagagaaggggggaagaggatgatgccagtgatactgggctgtattgttaggtcactaaagtccagtgtggcatccaaaagtgtgcctgtcagaccgagtcttcccgtcgagtacgctttacagagggcctcatcctctgagggctgaccgtgggaaggcagggaactggacccaaagatcctggcttttcctccccaggagaccagggataagctcagcatccccatacrctgaaggcagcaggaagctggctgtctaacacctctcttgctttgtaagagggtccttcctaatgcagagctggggaaaggagagacgctgggaggggctagcatgccgcaccagggaaaggctggtgctctcagcggtggctggctctgcctgcagctacgtgactgagagaagaaagtcattyagagaaatcccaagacacagagagcagcatcgtggcttagatccctcttgcctccctcctccgagggctggcagtggggagtgtatatacctccgaaaatgagagctggctaatagcaggaagcccagggcctctgcacctacttacctcccaccagaagaaagcaccattcctcagcaccacccccatcaactcaggcccaggaacaggtgaatccacccagccagacacaagcaggcggggaaagatgcagggagataccccacctgcgtatctccttaaatctgctttaaaatcttccaggaggctggcagatcactggagctcaggagttccagaccagtccggccaacatggtgaaacccatctctactaaaaatacaaaacttagtcaggtgcggtgtcacgcccataatcccagctacttgggaggctgagacacaagaatcaaacccaggaggtggaagttgcagtgagctgagatcgcactactgcactccaaactgggaaacagaatgagacctcagctcaaataaataaaatgctccaggagggaaaaaaaaaaggagtgagagtagatggaataaagtcacagtagaatgtggcatcaggtgagggtgacataggggttcactacattattcaccatatttttgtgcatgtttaaatattcccacaatatataaaagctaagaggaaaaaggcgagtaatagaaacagggggactacataaggtcatgatgcctgtccctctttgtcaaacttctctgtacctcttatcttggagatgccctccctgttcctgccctacagccagcattcttttgcctttattccatttcacaatttccacatccctggctgttttcctcacccccactcagctccttgcttatcgccttcttcttcaccctccttgtcacgaccctgtcagaagctctgataaccctccaagaagaccaagtccaagagagcagaccaggaaccaggactcctgggtttcagccccagcaacgccactgtctgcacctatgcaactaacccctacccagttcacatcacatgaaagcccagcagagcccccaaagagatgttcagaagtcactgctgctgctacttctacaaggcaaacaaaggagagcccccatccctcagaacctgtttgctgggatccacctcaggcagcagaacrgggacatggaccaggctgcctggcagggcaccacggagggctggggaaatgggaatatagatgccatgatgatcatattaatgagggtaaaaattaggaccaacaggggaygtcccctctgcacatgtgtacaagtgtgtgcctttcacagacaatagaggctgaagtcagggaggcagcatgcacaggcaggcctggctcagacaggggccacgtcccagtcagacagtctcctgccacgcgttcccagcaaggatgtgaaaacagccctgccactcgctttccacccacacccctccatgccttgcctttctccctctttttcatgagggaggagagtgtgctcgccctcttctctcccaggatgacagtcaggcctggaaaacagaaggcaggaccaagggacaaatcagggtgccctcaggtctaatgccagccatgtcctgccatactgggtgcctgcggaacccacatacccctctccaggctgagaagatggmcacctgacctcctttgggaggtcattcctttggggtggtcatgttttgggggaaaccagagagaacctgaagtgaggaaacagcttggggatgaaggtgctgtacagacaccrggccagtcccgccrgctactcatgtttactatgcacagccagcacacccatgggcgaaagaccttcggtgccccctgctcctaagagctaagcactaaatagtgcatccgctgctgctccctgctaactctcccaatggaccctcacgctgccccactagggactgggatttgaagaggtaacctttaactccattgttgagtgaggaaataagggcaagggattttaccctaaaatagggaatatagactagttggccttggkatctaaagccaggagtcccgactcccagccagggctctccccatgagacatgggagagttggccaagctttctggggaagagcaccatctggggttcggttttcctagctagccaaggagaaggagccggccctgacaaactcagtgacattcacacagggcatcgtgggaacaaataaaagccacaaaccacaattcaacacaaagcaggctggatcctggcagctgcagactgatcagcccaatatgtcccgggggtggggcaggagaggactctgagatgcccgggaaggacatttgtcatgccagccagaccaaggctgccccgcagagtgagagcaacaaaggatgcagatccaggaccaggatcacaggcttagctcagctgcttctaaccaggagccttggacagatcacttggcctctctgactctcagtttttctacctatagagtggggataatgcatcttccttacaggaacaatagaagtgctttgtaaaccataaacagcacaggaaaatgaaggaatatcctagtcctcttgaggattagagggggagggaagaggagggaaggaagagaaaaaggtaggaaaggatccamaatgaggctgagattttgaaacccaacctgctggctttatagccaagcttttcatcatcactggaaactcaaacctgcagcaattatatgctgaggtcataaacgtgattaaaaaggttgtttgcaaagctgattccagggaaatgagctgcagatggcggtggcatcaatgtccttttgcagcaggcagcagctggctgtgtggactcagggacagctggaaggagttgtgctaatgcccacccccagctttggaaggcgggggcaagctgactgccctctctgtgcctggggacaggggagacttgcagagagctgaaaccctaagccataaaaccgccatttgttccagagagaaaagccagtttttcaattccagcccaaccaggagggcgggccaagctcagagaaagaagagtggactgagagcacgagtccttccacggcagcctgcctcgggcgggacaggctgcagtggctctggctgtccactgggagtgtccttggtgagggaggaaagaaggcaaagccacatctgaagtctctcggccagaagaaccctctgttctgaggccaacaggtagccctggtataaggagaaggtggaaaatacaggcaccagaaccttctctgctgcttatggcttcatagaatgttttgcaggtgacatttcacataagtgggcaccagcctgtctgtctttgatggaaagacatcaggaggcaggacccaggtctctgtcagtggcttcctgtcagagtggccaacacgggatacttaaaaatgtgaagaaggagacgtcgatcaggataatacaatgagcccttggcccaaatttgggaagggccctctcttttgatgtatctcactacctcagctgccatccctctcctggtcacttctacccatgcttcagccacagccccacttactccaggaagccctccctgatgagtcacctgcagcaacctcctgtcctgcagatcctcaccccgtactgctcactgccttggctgctgctcccaatcactcatatgcgtgcccatgtctgtctgacaactgggcgctccctaatggcagaagcacatccatatgacatttctcaaatgttccctatagtacagggaacccagagcacgtccaatgacgttgggatgtgagcctgcagagcttttcacaaatttgcagaacaagctgtgtccttcagcatcattacctgccctccccctccgactgaacctggagaagagtcaacagcctgctaccaaaaatcccccacagcccggactcggatgattcgcctacaaaggctggggagcacagtcccaggcttactaatctcctctctaccccatccccattttttccagtccccagaaagtcccaatcaatctctcagcaaattccacaggatctgtcagattcagatccagtcaactgcaggccgagtgctcttcgcatctcatcttatctactgcaggaagcaacctgagggcagcaaagaggaagacagctggtatgaacgggctctgaaacctaccagctgtgcggcccagagaaagctacctaacctctctgagcttcagctgcttcagctgtaaaatggcaagtataccgcctttctcaggtttactgttgaaatcatgtttgtaaagtgtttataaagtgtttagcactcttagaaagtactcaataatggtaattaacatgaaattatcataccaatctcttcaggtaggtattattgtcttctgtctaccaatgagggtgaaggtcagagacgttaagcaactggttcagagccacacagtatctgctcaggaggcagagctgggggttcagacagagcagcagagcgtgccctcagccctggggaagtttgcaacctcaagtcacagggacagagtagctgtgggaacttgggtcaggtacctccacccctccccaggttcagcagctccccaggaatcctggaacatgaggcatggcctcagcaagtctccatttgagagaatcagctgggatctcccagattaagtgttgttgcaggcagctgggccaaaccgcctgccctggaccctagagctcatcagattggcacctgctcttcccacacaggcaaacacggatggtgccactggcygaaccccgccatcagccttcacacagttgagctcaccaggaaagcagaatctctaaaactccagctgcagtgcaagcccagcccccagggacaccgctgtccacatctgaaatagctggcgatcatcacrgggtgggagacaggatgcagtgggcaccttccacattgaaacccactcaattaaaaccccacgtgtgggggacagacacacacgtacccatcacacccagtcttacgtgtccactgagaccctggttacgttagacatggcctcaaaggaagtaggtactttcacaaacatcatctcctttgatcttctcaaccaccctgaggagtatgtacttttgccccactttacagaygaggaaactgagaagacatcaggcaatttttccaacatcacacaaaggataaggaaaatgttaggatgccaaccccatgtctccaggtttcyttccactacagcatgctgttcatttgtgatctcgttcattcatccatccttccttccactcattccttcattcactcacctatatttttycctaaacagctacaggtcaccactgtctgggttgtttgctactaccttctgctgctgcctgagaaaacctgggagactgtgatcacattttttttcctgtagagctgcccgaatacagctcttctcaaagccttgcagcagagatgatacagccatcagcagctgatcctggaatgagtgttgagagcagcacagaccactctacgtttctgctctgaccacaggtctggcctagaatttgcccctccactgcacaatgcagstaaaaacctttaaaaaaataaataaatggtctctgagcctcccagaaatacagcacttagaatgttgtttttggagggggcatgtgataaagaatgggaaagataataaagtagcctgtcacccagctcacaggcaggtgcatgtggctgcaggggatcgtttagtcaatttaatgacatatttgttgagtatctattactgtgcctggtacgggatggagtgggtcagggaataggggagggcacaaagggagtcaaaaagaatagaaagaaagccgtcaaagggctgayggtctggttgagggaaaaagacaggaaccatctgcttagacaacacagatataaagtgtacttgagaaattcagaggatggtaaggtgcctgcaagtggggacacaaaaatttcattcagaccatggaatttcagctagacagggaaggatggccagaatttaaacctgggatggtatagaagaaaattacccaggccaggcgcagtggctcacgcctgtaatcccagcactttggcaggccaaggcgggcggttcacctgaggtcaggagttcaagaccagccccgtctctactaaaaatacaaaaaattagctagccgtggtggcgcacacctatagtcccaactcctcgagaggctgaggcaggagaatcacttgaacccaggaggcagaggttgcagtgagccgagcacgcaccactgcactccagcctgggtaacaagagtgaaactctmtctcaaaaaaagaaaagaaattacccaaactgcctgctcaacaccattgctaatgaaaaagcctgccttggtctctccttccctgatcttagcttttctttctatctctgcaaagcctccgtatagaaatctggttttattgtgcctggtaagggtcctagttcagttctaaaacaattaacaaccatgaagggacaaaagtccgaagtgggcatctcgcttatggcacatcagcctctagtcatagtcaccctcagaccccayctagcggctgcccgaattatttcattcagggatctgtgtgtttggctgataaccaggcaccactggcccgtggggtgctatgactattgcagtgttaaaaacaaggcacttggctgggaagacgtctgccgttaagtggcaggctcatggacaacggcctcaaggtatttttccttcagacatttggtcccactttggcaagacatcttggcattgcttgggcaagatattacgctctgcttcttcagagcgttgggtgggagataccccatagacagctgaagggactgggaccttgggaaatcacatttaaaatttttggacttgtttaaaattgtttgacttggtttaaacacagttcaaagcccagctgaggcattaagggtttgtcacctaaggttgtcatctaaaatgggaaatgtgtgctctattcctccttgtggcccggtaggatgtattctgcagaattgggctgcttttagctttgagcttgtgaaaaagaaaaagttttttttattgcaatgcttcctggctataatattccctaggacctggggaatggtagccaggatttggatctttaacgtaaagccaagagctaaagaaaattttagttagttgttagtcatggtggacacatttattggacaggtgcaagcctttccctgccacactgagagggtttcaaaagccttactgaaagaaattttcctcagatttggggttccattccccatacacagtgataacgagagtgcctttattgccactttattgccacttttttttgagacagtgtcccactctgtcacccaggctggagtgcagtggtataatcacagctcacagcagcctcgaccttctgggctcacaggatcctcccacctcaacctcccaagtagctggggctacaggcacrcaccatgtctggctaattttttttttaataggaatgaagtctcactatgctgcctaggctggtctcaaactcctgggctcaagcaatgctccagcctcagccaccccaagcctgttgatttcaccataattaacccactgtctaatttctcattttctgactcaactacaaattactgcataacagaaaaatagcgccgggcgcagtggctcacgcctgtaatcccagcactttgggaggccaaggcaggcagatcacctgaggtccggagttcgagaccagactgaccaacatggagaaaccccatctctactaaaaatacaaaattagccgagcgtggtggcgcatgyctgtaatcccagctactcgggagcctgaggcagcagaatggcttgaacccgggaggcggaggttgctgtgagccgagatcgygccattgcactccagcctgggcaacaagagygaaactccatctcaaaaaaaaaaagagagagaaataccattacatgtcccttgcttctaggagctaccttgatcaagtttgccgaagaaggaatcatatgcctcccctttgtttagtttactatcagattgatgggaattctagatgcccttactcttattactgtsattccctaacagcctgttcaggaatgcctccaagctgtatcttggatcgagttaaattcagcaactccttactacaaagcaacactcggaaatagacctaccaggtccttggtttaatccaatccacgaagccctgctacaagattctaaacttaatctatacaatctttctgtgttcctctgtgcatcctcagaatatctatttgtttgtaggggataacaagaaaccctctggatgtatgaatgtattgacagctagcatataggaggaacttgcctgtaagratactcatttatcccagttttctgtacacaaaactgctgaaaccaagcactggaaaagctccctaaaattacttggtaaaactaaatggtccacaactcactttcgagatatacagattcatacttgcctggtaccaagaagacagagctgggtatttcttcagataaactttgttaccttggcggagaacggtgccccatgagcgcagaattagaaatctctccctttatgaattcttgtcaaggaaattgcaatcgcagcccagcagagaggaattaaygtattgggtcaggttgtcttagataataggatagccctagattacatcttagcggagcagggaggagtatgtatggttgcaaataccgcgtgctatatttacataaacgaatccgtggaggtagaaactcatctaggaaaagttagagagcaagccacttgggtacaacagcctcccagactgtctctgaggactggttttcttttytgttttcttggattcctcgtggaaaacagtctatgttttctgggtggctaaaactaggcatgtcagtcttgttaattgtgcttatgctttctattatgaccaaatgtgcattaaaatgttgtagtgaagctgtgactaaagcaactaatacaatgatagttcagcaccacggtgccatgcctgggactcgtgaatattgtgaactccatgctattatagaaactttctctcttcatatcctagtccccgatctttgccccrattcagcaggaagtagccagagtggtctgttcccctatacccctcaggattgtggagtgacaaggatggaactgagctgcaacaggggcccctttcttaggagcctgaagaccccaagcatgaaaataaagaaaaaccctaagttccttcaagagaaattccaggcacctcactatccccagaagtaaataagaaggtaatagtagcctaaaacaagagccaaggacgtttgagttccagagatgtttgctttccctgtaggaactaaagacaacagctgaacatacgtccttgagttgtctttcagaaacccccactgaggaaccacaccgaacagatccactggcatttagacctcagataagggggaaactgaagataaaacttcttcctgatggggcttagagaaagtcacaccccatcccagccagttaacatttttctgcagatcccaaatttttaaacaaagcttctcttctttaaccagttgcaaatccgaaaatcttcgaatctacctatgacctgtaagcccccctcaagatatcctccccttttaggcctaagtcaatgtgtaatctccatgtattgatttacgattttgcctgtagcttctgctttcctgaaatttactcctgcctttaaaaacccttgcctgcaaaccattgggaaggtcaggatttgagcatttaactgcttggtcctctttgcttggtgccctgcaaatgaacacttttctgtcactgcaaaacctcagggtagatgtctggttttactgcaccaggcaagcagaccccagttcactataacagaaggcggtgaggaagaacttaggtttttattccgagtttagcgggaagcagaggctattaagctgagttacgacatagtctcaccattttagtccaagtcttagtcctagcaaaacactttggctgctgtgtggaataacgcttataagaaaacaagcatgaagccgaaagggaagtaagggcctgggcgcggtggttcatgcctataatcccagcactttgagaagccaaggtgggaggattgcttgagctcaggagttcaagaccagcctaggcaacatggcgggaccccgtctctacaaaaaatttaaaagttagctacacatggtgctgcatgcctgtggtcccagatactcaggaggctgaggtgggaggattgcttgagcccagaaggttgaagttgcattaagccatattcacgccactgcgctcccgcctgggcaatagagcaaaagcttgtctcaaaaaaaaatttgtttaaagacaagtaagggaaatcttccagtattctaggtgagaggtgatactctagactaggttgaaagcactggtaataaagaatagtggatggaccggggatatattttgggagtagggccagaagaatttgctgaatgcctggatggggaaaacaagcaccagggagagctcatgagtgtctagctagagctacggaagaagatgggagaggggcaaggcaaagggtcgaaatcaagagttctctttggttcaggtaaatccaagatgaaattagatgtctggacaacatgccgaaaagaagaaaaaaaagaaaagagaaattagatattgaggtggaaatgccaagtgggcagatggatacacccatcctgagttctgaggagaagtctgccctagaggctatggacaaatctacgcaaagatgacacttagcatccaagaattgcagaagattagccacggagggagtgcaggtgggaaagacgacccaggcctgagcccagatggaggggcctggcagaagcagaggagcagttgccaccagggcagctctgcagaaccatctgaacttgacaaaaccccagaggcagcagtagggagccacagatatgactgggattaagcttcatacctgggctgaatgaaggcttagagtcagaaatgttccctgttacagaaaaattttaaacttgtacttcttggccaggtgtggtggctcaggcctatgattccaacattttgagaggccaaagtaggagaattgcctgagcccagaagttcaagaccagcctaggcaacatagggagaccctgactctacaaaaaatttaaaaattagctgggtgtggtggtgcacacctgtggtcccagctgctcaggaggctgaggtgggaggatcacctgagcccagaaggtcaaggctgcattaagatgtgatcattccactgcactcgagcctgggcaacagagcaaggccctgtttaaaaataataataaatttttaaaaaatatatgtgttttgagacagagtctcactctgtcgcccaagctggagtgcagtgacacgatctctgctcacggcaacctccacctcccaggttcaagcctttctcctgcctcagccccccaagtagctgggcccacaggcacctgccaccacacccagctgatttctgtatttttagtagagatggggtttcaccatgttggccaggctggtctcgaactcctgacctcaggtgatccacccgcctcagcttcccaaagtgctgggattacaggtgtaagccaccgcgcctggcctaaaataaaaactttaagttgtacttcttgcatacctgagtctgaggaatgagatttatatccactactcataaaaataattacataaaattttatatatacataattaactaggttatgtatatgtctttatatgagtgtcacaaaataatcagtgccctgaaggcaaagaaagaactaggaaggagaatgggaaggggctcagtcaagatacagccttcaggggaggcatctcttaagaagtcttcatagcatttctcctttccaatcagacctctgcggcaaacatcctccaccagatcctcggccaggccaagaagcttccaagcttgatcctcctcttaatatttattggagctggaggtcctggagcagcactgtatgtcttgcatctggcactgttcratcagatgttagtaggggcagaaagaataacccaaaaaccctgagacaaactgggtgccaatgatcagtacaagttcaactcggtgaatgtggattacagcaaactgaagcaagaaggcccagatttctaaatgaaatgtttcactctaaagctgcttagaatgaagctcttccaggagccatccgcacaatttcccacttaaccaggaaacatttctcctctaaaatacatgaaatcatcttgaygtattattttggagattacactaattaatacatatccgagactcgaaaaaaactaaaaaagaaggtttcataaacagaagacaattcaagggagttcctgtgatcctaaagggaggaaggatttttgccaaagggtgagagaacagagagatgaaagctatggaaaggacaacagcgcaatttaaagcttgagaaaccaaaggtaaatgagaatggcaaccacaacaaaaactaaacctgagattgaaggggaactgagtcttcagaggaaagaaagcaaaggaaacatcgtttgaaaggttaaggatataggtagcttgcaactattctcaactgggcttcctcatccgaacagggttccttattcctcatctgacccagagtacatgacataattcgagtgattatttcttaattcccataagaatggcaaattggccgggcacagtggctcacatttgtaatcccatcactttgggaggctgaggtgggcagatcgcttgaggccaggagtttgaaaccagcctggccaacatggcaaaaccctgtctctactaaaaatacaaaaattagccaggtgtggtggtaggcgcctgtaatcccagctacccgggaggctgaagcaagagaatcccttgaacccaggaggcggaggctgcagtgagatgagattgtgccgctgcactccaacctgggtgacagaacaagaccctgtctcaaaaaaaaaaaaaaaaaaaaaaaaggcaaatctagaatccagaaggatggcactgatctagatgcatggagggtgaagttgatcaattccatgcaatagatgacatcgggcactggggcttagaatccagattttaaaaggcctgctgttaagatgtctgtttgataaaaaatcataataccagaaaaccagaatcagcaactaaaatttaaaataaaaatagagatctcacccaggggacttttaagcttcactgaggcaatgtggtatgattctggagtggagtgaaagccttttctgacccagatatcctgtcattagtgttcacagccaacacggtctcagttgtgcctacctggcttgcagcattgggctctgccccccggcctctgttatttcgggaccctatcatccccattgctggcagcaagcccagcgctgtaacagcatctcctgccatcagcctgccctttggaatgctgggcggcaactccagggcttctctgtgatgctggtgccctcctcaccaggccatgacttagcacgccggtaaacggagtatgctctgggccctcctagggaacactgtggggggtggrttttctggcctctatagtctaaccagtttggcatgcccactgctctggacatcctgattccttccttcaccatttgctgtggcagttcttccaattctacctcacttaacgtgggtcaatacttttccaggcctctaagaggcaacctcttagaggttgtgatgtagtagtatgttggcgccatctcccggggtcctcgtcagggtgtaaattccgtaccgtaaaagaaagttctcccttttccaatttgtattttgtttcctttggttcagcaccctcaagatccagtcccgtacatattcccccagttcctgatggttcacattgaccaggcctacaactacttttttttcttagcaggtttgttttcttagcgggcccagcacttctgtggctgggttatgttctaacttgcccttagcttcgggtctgatggccaagagaggaggcagagctgaatcctgagcagagcacgagttttcttgcaagacacgatcctccacatgatcttcaaataagccggaggctctagcctctaacagagaggagtggatcacttctgcaggccctcttccccacttattaccggcagccttgcactcacaggaatgcctttcttcacaggcttccattccaaagatcttattatcgaaaccgcaaatatgtcgcataccaacgtctgagcccttttaattactgtcattgcctcctccctgacagctgtctacagcacccgaattattttctttgcactgttaggacaacctcacttcacggctgtaattgtcatcaacaaaaacaaccccttcctaatcaattcaatcaaatgcctaacaattggtagtayttttgctggatttttaatctccaacaatattattccaatatcagttccccaaatgactatgctccttcacctaaaactcacaaccctcagcgtaactattttaggcttctcactagcaatagaacttaaccttgtaactaacaacctcaaactcaagcacccatcacaaatatttaatttctccaatatattaggattttacccaatcacaatacaccacacaacaccacactcaaatttccatgcaagacaaaacctaacctctcttcnactagaactgatttgattagaaaaatcaacaccaaaaaatactgcccaggttcaaatgatagcctccaccattgtatctaaccagaaagatctaattatgctctactttttctccttccttatcccatctctcctaactctattcttaattatttaaccctattccctcacataatctcaatcacaataaagatactaacagagatcaaccagcaaccaccacccaccaacacccataactgcacaaggcagctacatccatagaatcctcacaaagtaattctatttccccaacctcaaaagtcacccagttttccatatttttaaaatcagttacaattcccacctcatcataatcaattaaccacataattatcaccaactctaacagcaaccctaatagtgaggcatcccaaataacaacactgaccctcaggtctcaggatactcctcagtagccattgccattgtataaccaaaaaccaccatcattccccctaaataaaattttaaaactattaaaccaggccaggcacrtggcccatgcctgtaatcccagcacttagggaggctgaggcgggcggatcatgaggtcaggagttcgagaccagcctgaccaacatggtgaaaccctgtctctaytaaaaatacaaaaattagccaggcatgatggcacgtgcctgtaatcccagttaykcgggagactgaggcaggaaaattgcttgaacccagagggtggaggttgcagtgagctgagatcgtgccactgcactccagcctgggcaacagagcaagactccatcacaaacaaaacaaaacaaaaaaactattaaacctacaaaagccccaccacaatttaacatagtackgcaacccacacctccactagtaattaatcccaagcctccataaataggagaaggctttgaagaaaatcccataaagcctataataagaataatacttaataagaatacagtgtatgtcataattcttacatgggatataaccataactaatgacatcaaaaatcattgttgtgcttcaactctaagaactctaatgactaacatccgaaaaacacattctctattattaaccactgtttattgagccacctgcacaatcaaacatctcggcatggtaaaatctcagcttgcttctaggtatctgcctggtccttcaaatcatcacagggttttcttarctatacactacatgtcagatactctgaccrccttctcttcagtcactcacttctgctgagatgtaaattattgctgaattataattatgctacatgctaatgaggcttcgatagtctgcatctgcctgtttttacatgtaggccgaggcttatactacgggtcatttactttcctagaaacttggaatattggcagtattcttctatttgcagttatagcaacagtattaataggctccgtactttcatgaagccaaatatcattctgagatgcaacagtaattacaaatctactgttagccatcccatatattggaactgaccttgtacagtgaatctgaggtggattctcattggataaagccactttcacataattcttcacttttcatttaatcttgcctttcattattacagccctagtagccattcacctgttattcctacatgaaaagggatctattaacccctcaggaatttcatcagattctgacaaaatcccttttcacccttattacacaattaaagatattctttattacacaattaaatatattacacaatttattacacaattaaagatattctttattacacaattaaatatattattcttattacacaattaaagatattaattctacttctcttgctcttatcaattctgctgacctcctaggagaccctcacaactacaccccagcaaaccccctcagcactccaccccacatcaaaccagagtggtactctttattcgcctacgcaattctacagtccatcccaaacaaactagggttttcttgcaagacaggatcctccatatgaccttcaaataagccagaggctctagcctttaccagagaggagtgggtcacttctgcaggcccacaggtccagcgggacctgatgattcaagattttttagtgcttggaccaagtgtccccatccaaagtctcagaatcttactgcttccaaatcagcaccctgacctacatatagcagaactggctggagttgagaattaagaattcaacaatttctggaactttgctattcatataagtccttagctgtacggcccttaggcaaccggagatgagattctatttatatacagccaagttctggcttcatacttcccctcacatggttaagtaaccaaccgaggcagtcattgtctttctccaatgcatgcatagcctccaacaacagtcatctaattccaaaattcttgtatttacttaatttcccctgaaactctcaacctcctatatgtgtcacttgccagcctatccccttctaccagtttcrtgtcccagtttgccacctgtaaacatgtgaacactggcactggcatggatgcctggggcaactagcgcttcacctatgatgggggctrgcgctctaccagtgatgggggccttattacagccagccaggtgcagcaacaacatcctattttagagtcagttcctaggaccacatccagtaccagctgtcacaggtggagttcactgggaaacacactckgagacaccgagatttctatacagaagttattggagagtaatcgcagaaatagcacctgtaagtgttgaaagacaaagaatttggcagatagaaaagtcgagctgagcctcagtgggtccatggagagctctggatctgggatggcccttctgagatattgcaaactgaggcatggtggacaagtcttggtacctcacaggaaccagtcattggatgtgcacggtccctagggagggagcttaatcttgggcagtgtctttctttggctaaaagcaacactgggaaagcagcacaggtgagaggtgccaggcagcggctccmccagcggctggagaatgagcagtgcctcagtcctggaggggaatccgggcagcacccacagcatccacaatgccctgcagcactgggagcagccctcacctttctgagactgtttcttgacctgcaaaataagggaacacagttggttcttgagcagtgtggcggctagggggcactcccaaaaaacctaagaacctattgttgaccagaagccttcccacagaaacagtcgattaacacatattttgtatgtggtgggtattatatcctgtatctttacaataaagtaagctagagaaaaggaaattataargaagaaaatatacatttacgctgggcacggtggctcacgtctgtaatcccagcactttgggaggccaaggcgggtggatcgcctgaggtcaggagttcgagaccagcctggccaacatggtgaaaccccatctctactaaacgtgcaaaaattagccaggtgtggtaagcgcctgtaatcccagctactcgtgaggctgaggcaggagaatcgcttgaacccgggaagcagaagttgcaatgagttgagatcayggcactgcactccagcctgggcaacagagactctgtctcaaaaaaaaaaaaaaaagaaaaaagaaaaaaatagaaaatatatatttaytattcattacatggaagtagatcatcataaaggtcttcatcttcatcatcttcacattgagtaggctgaggaggaggaagaggaagacgaggagttggtcttgctgtctcgaggtagtagaggtggaagaggtggaggaggtggaaggggaggcaggcgaggcaggcacactcggggtaacatttgttggaaaaartccgcacagcctaggcaacaatgcaaaacctctctataaacgatagaaaaattagctgggtgtggtggtgtgcacctgtagtcccagctactggagaggttgaggcaggaggatcacttcaacccggaaggtcaaggcttcagtaagccatgatcacgccactgcacaccagcgaaggtgacaaagggagatcctgtctcaaaaaaagaaaagagaaaaactccgtgtaaaagtagacccacacagttcaaactcatgttgttcaagagtcgactgaaatagctacctcaaagatgtccaaaaaagcaaatgcaaaaacaaatgcaagcaatttgtgaactgttaacaaggttattcttctcatcctaaagtctggagcaatctcatcaccatctttctattatgccccacacccacttctcgtctcaagaartcagtattttacttttctaccaggatttagctttactgtccactttactgcttctccaaaaagttgcagtgatgatgttgagaagtgactaattcattaggtatatctttatttttcaccataaattaatttctaaaataggctctataattaccaaaactcttctagtctataattgggggttctataaaacataaaattacaggatttatagttctttaaaatggaaaagtgctctcaaaaaatgttactagttcaaaggagattcataaatgaatcatgtaattttaarcaattctcactagatggagctagttacaaataaatactttttwaatatttttcttctttwtytttaattwtttatttttatttattttttattttttgaggaattaacagtctttattgggctcagatcaggaggccgtgggtcttgaggacctctgtgtatttgtcaattttcttctccacgttcttctcggcctgtttccgtagcctcatgagctgtttcttcttcccgtagtggatcttggctttctctttcctcttctcctccagggtggctgtccctgcctggtacttccagccaaactcgtgagccaggcgccccagataggcaaactttcttgtaggcttcagacgcacaaccttgagggcarcaggaaccaccatccgctttttcttgtcgtagggcggtgggatgccrtcaaacaccttgaggcggtccagagcggcctggcctcgcttggtcttgtgggkcagcatacctcgcacggtccgccagaagatgcggctgggggcccggaagtggtaggagcctcggtaagagttggtgttcatccgcttgcggaggaaagcgaggtacttcaacttgtttctgtagaaattgccagaaatgttgatgccttcrcagcgtacgaccaccaccttccggcccagcagtacctgtttaccacgatggccgccaggcggcccaggagatggcctcgaccatcaagcaccaggacctgcacctctgccgtcttcgccagccgcttgggaaaggcttttcttctctttaatacaggaatattttaattccttgtaaggaaaatttcctggataattccatgtattttaataatcacagagatagtcttattcttactcattcattaccaaaaataaagacttcagtaacaatttatactccatagagtatacgatctcatctattttgacatccaaaaaaaaaaaggcagaaagacaaaacgcaaattctgaggcagaaattaagaaaatataattcttattttttatttaatttattgtttgttccgctgtttgaatgtttatcttccaggagcctacagaagtgagggaaagtatctgcaggctaattttaaataacacgagacagagattaaacattaaatataaaaaaaaaaccttttagcttacttattaaactaggaagaattttccttaaacacatcactcaaattggtctgcaatgcatcaataaatggagaacatagatctcacctaggaaatattttatacattgtggacactacaaaaaagctcatcagaatataaaaattttcaagtcacaatcccctaagcagactaaaaacaagttagcgtttaacctgaaatcagaagtgcaaactctgtaaaaataaaaatattgccattgttctcagcaatctatgaataaatcctacaactccttaaagtcttttcaataaaatgaaccatgatctcttgacaaactccttgcttaaatggcaggtaacttttgaagctggacttctcaatctgtcaagagaagcaagctgcattggcagcattgctcgcttttgaaaatcaccttctgaacagaaggtccagcaaagaccttcaatgcaacactccctgtatatgtgcaagtctgcatgagacgtcctcccgcaggtgcaactcccagccaatgaaccagaaacagatgaaagacaaaaggggaaagtcgaggtcaaatgtttcagtttacccatgctatcccagataaaatgccaagggcttttggaataaaatggacaatatgcaaagatgaggtgaccagatgtcaataatgttgggaatttaaaatgcatgtaccacacatgaacacaattctttaaatgcagctgcaggaagttccgtttgggggtcatcctctttgaaactcccttctgggcagtactgcttgtcatttctatcatctgatacatctatacttccaaataatcctaactgatactcaaagtgatgccttgacaccctctgaggttctacaggmtcttccaaatcaaagagaggtcacatcatgcatagtattatttgggggttagcatacgttttrtaataattatgttaaaattggtaatccctttttgrgttcaatgatagctctattaattatattgtcttgttaactgaaatattccactctgtcaatgggattaatggttggagattatgatacaaccaaaaccaaagctgggcaatgggctcttggamtggaatyacccattatgaactatccatctgaccaactctttaactttcttcctaaacgtcagatcaccagggcgtttcagtgcagcctgcacaattcagagagtagggtccagattaaagaccttacatttttgtagaattcagaatcatttttcattcagcaagccctctatttgctcactctcttctacatgtaattgttcaactttggttgactgtcgagtcctcatggaagaattcccattctgccactgagcctctctgttagggacttgaaaatggaaggtagtgcagttctttctgaccatctgccaggcaaggagcccmgggcttctaggggtaagttcgtcccttttcccaagtctttcactttgcactcttcattcagagttaaatggcataaaactcggattttcaaagccagttgatttaatctgagacacataagactaggatcaaataagtgaagtaaatgattcaaatgcaatgacttctgttgttgcattctgttgttgcatagaagaatctaaaattcttctatggcctaattttcagaaactattttaggacaaaaaagaaccaaaaaaaagttctactaaaaaaaataaagagacagactagtaatttgcttggtcagagcttctttttaaaaaaataaaataatattaagtcaaagaggaaaacaaatataacatcaaactatttgcaaaataatgaaaattggctgggggcagtggcttactttgggaggctgaggcaggtgaatcacctgagacaagagttcaagaccggcctaggcaacatagtaggacctcatctctacaaaaaatacaaaaaattcatgggacatggtggtacacacctgtagtcccagctactaaagaggctgaggtggaaagaccacttgagcctgggaagttgaggctgcagtgagcaatgagtatgccactgcagtccagccatgtctcaaaaacatcacaataataatgaaaatgagaacaatgcatagaaaacttagtttaggggttgtacaagctacagcgtaactcataaccttaaatgtttttcttcttagaaaaaatctaactcttcaactcaaaaaattagaatagctaaaacgaatctaagaaaagagaaaaggaaaataaatttaaagaaaataaaaacagtaaaaatgataaacccaatagcagatgttttgggggggaatacaaatgaaataagcatctttctgtcaaattcattctacaatacacacacacacacacacacacacacacacacacacgaaaaaaaaaaccatacaacagtctggaaatttttaatgataaaataacaattattcgtatatgcagataaaacagaaatctcagtaaactagatgattaacataaagatataatggccaaaattgactcaacaagttgaaaacctaaaacttatggtgaaagaagaaartatttaagttatcaaagaaatatttgttagacatttcccaggctcagatagttttactgtttaattattttaaactttccatagctagacaaaaatacacaaaaatatgaagactaatttatgggccaaatattgtttatgcagcagaactcatctacatcacataattccctctttcttccatttattcttagaagtctgcctctaacctgcctctgatagaacacttgattggatttttcatttctttgcctcttagaatattaaaatgtttttttctggccagctccacaaaactctgattttgatgaaattttgccttctctcatattttttagtgacaggccacccaactcttaaacatttgattgcattctggaaagctctgtggctctgagagaccatgagatctccttccttacttcctccctccctcctttccttcttccctccctcccttctttccttccttccttctttctttctctctctctcctttctttcttctctttctttccttctttctttctttccttccttccttccttgcttctttctttctttctttctttctttctytctytctctctctctctctytctttctttctttctttctttctttttctttcctgacagagtctcatcctattgcccaggctggagtgcagtggcccaatcacagctcactgcagtctcaacctcctgggctgaaacaatcctccctcctcagcctcctgagtagctgggactacaggcatgcaccacaccctgctaattttttttgtattttttttagagatggggttttgcaatgttgcccaggctgaaagatcatatttcttaaagtcattctactaactagtccttccagttattacaaattataaatctgcaataattaaaatggagtcatattgacaagaatagctttcagtgaaatagaatagagagcacagaaagtcacaagattttaaaacaactcaacatataataattaccaatcaacaggaaagaakgaaattgttctatttattgcataaatagcattgtagaaattggcttgctatttggtgataaaataaataataagtcrrgtayggtggtgcacgcttgtattcccagctactcggtagctgaggcaggaggatcgcttgagcctaggaattcaaggctgtagtgcaccatgatcacacctgtgaatagtcgctgcagtcyagcctagacaatatagtaagactctgtctctaaagataaataaataaatcccagmygaattagagatccaaatataaaataaaaccaaaaactatatcatragcatttatcttctcttcaaatgaaagcacgttccaagcttaaacacaaaagaagataccataatccactgaactgcataaaaatttaaaacacctacatataatcatgacaccaaaaagcaacaaccaattggaaaacaatatttataacaaacatgacaaatgattaatgccttttatatataaacagcttatgcaaatcactaagaaaaacactaagaccccaatagaaagttgagcaaattatatgtaaagaggtttcccagaagaggaaatataaaaagaaacatgaaaaaaaaatwaacctcaataggaaacaaataaaagcaaaacttttaaatggcaaaatgccctactttttctatgaaattataaaggttacaaatataaatactcaatggtaaygaaggtacaatactataaacattctcacatactacttttttttctttctttctttctttttttgagacagggtcttgctgtgtcacccaggcacaatcacagctaactgcagccttgacctcccacctcagcctcccaagtagctaggactgtagatgtgtgccacyacgcctggctaatttttttattttttgtatagatgtggcctcactatgttgcccaggctggtcttgaactcctgggctctagcaatcctcttcccttggcttcgcaaagtgctgggattacaggcatgactataatagacatacttctataagagttaattagtataacatttctggaaagccttttaacactatcaagcatgtttaaatactctaccttttaacccagtttatctatgtattactaatatattgctacataataaagaaccctaatatttagcaatttaaatattttaaagaaccataacatttattatctcacatagtttctactagacaggaatctgggagcatcttggcctagacrgttctggctcagggtttttcatgaggtttcattccacctggtggccagggcttcggcggtctgaaggcttagccagggctggaagatctactcccaagkcagctcattcacatagtagttggcggaggcctcaggtcctcaccacatggacctctccagaggaatgctgaagtcttctgccagaacaagtgaaccagcacagagagatcaaggagaaagccacaatggcyggccgcagaaatcacacttcatcatttttgcaatatcatactggtatyacaaaaaasctccgttcagtgggaagtgggaataggggtgggctcaggtggtggtacttacacaacagcagtaataacagaaaaggggaccatattgttrgaggctggtcaacagaatctctttgtaggaatctaatttaaccaaataatctgaaatgcagataaaactttatgcattaagatattcattataataatatttgtaatagtaataatttgtaaacaatactcagtaatggagctggttaagtaaatcatggcacatctctccaatattcaattgtattctatattgcctcttatacaatcacatcaaaaatacatgtcattttcatatttccatatatacttatatgtgtagaaaaaggatgagaagaaaatggactaaatattaatgactactacctctgggtgatggaataattacttattatttacttttcatgcttttctccatttttaaacttttctaaaataggtgtatattacatagataattagaaataattctttcaaggaattataaataccgttgagacattgtgcctatagtctaatggtaagaagaaagaaaacaacagaaaaactcactgatcttgggagagtgttaccaaaattatttcatttttcagtccaacaaattgcaaagtcattktgaagaaggtgtaacctattaatctgtatgtattatgtacacgagttaaaaaacagaatgacagttgggcgcggtggctcatgcctgtaatcccagcgctttgggaggccaaggcaggtgggtcactcgaagttgggagttcgagaccagcctggccaacatggcaaaaccccgtttctaccaaaaaccacaaaaattaggtgggtatattggcacatgcctataggcccagctattcaagaagccgagcgtgagaatcacttgaacccaagaggcagaggttgcagtgagccgagattgacccactgcactgctgcctgggcgacagaacaagactctgtctcagaaaaaaaaaaaacagaatgacaacagatattttcagagtatcttgtagtttacaaagcacattcacatagttattygcttgataaatcagagtacttctgcaattaacactcttgccagctatttatgtcactcaagatgtttgaaaaatgccttttgtgaattgtaactgaatggagccaaattcttctggggcatatggctgtacaacattcactgggaaaggcaactaattgcatgtgtgtacacctcagggaagaatttgtttaagataactgaaatatgtttgagttgaatcttttcctactccagctaatggtcatcactttaactgtgttctttccaaagctttattaaacacgctatgaaaatactgagcttgagcctgctgatgggaagcaaataatctcccccttctttaaaggcgcattcattctttcaggtcagtagcatcacattgcaagatcctgaaaatcagtgcgcagttgagtcagaaagcttataattgaatttgcttagctaagtatcttagcaactcagttcacgtcagcggaactttgttgaagggtrtattttcatcatttcttgccagatttttaaagcatgacatgttgtgttactaaaactaagtaattcttccagggggaggaagcagtagtgtctattatataccttccactttacttatttargaaaacataaaaagccattaccgggagaatagaatgcattgttctgaatctaaatgacaaagcaatctttgtttgtttgtttgtttgtttgtttgttttgagacagagttttgctcttgttgcccaggctggagtgcaatggcacgatctgggctcactgcaacctcagcttcctgggttcaagcgattcgccgacctcagtacctgggattacaggcagcygccaccacgccccgctaatttttgtatttttagtagagacggggtttcaccaygttggccaggctggtcttgaactcctgacgtcaggtaatccgcccaccttggcctcccaaagtgctggatttataggcatgagccactgcgcccagcccaaagcaatcttttagaagttgtataatcaagaaaaagaagaaaatcgggggtttttttttagggattcggggtatgcttatgagcacaggaataaaggaaaaaggcagtaatctaagttgcatatataatgcctataaaacaaaaggcaccgtttgacaaggtrtctggctgatataatgggaaaaccaagaattcaggcttcaaaggaggttttttaatgcttaaatgatgtggtttgtctgatttaattatataatcagcagctttccccctttatgttaaaaagtgaccaggtaccacagtatggcctagaaagcactatccatatacatcagaatatgcccggcggggttccattggtgtgaccctctgaccagctgccaacctgctgtcatgtgcttcatatttctttcagaccattgcggtagatggcaaagaataaatggccacaaattatttgtagcaatttccaccaggatatgaactctacttccccaccccttgaacccagactggccttgtgacttgctttggataatgggacattagcaaacgagatgcaagcagaggcctgaaaaacatttatgcaatggggcttgtcctctcttgccccttttggaaatcagctgccacgyggggcagagatttttcttccacttcaataacccttgacttcaaccttccaggtaaaactattggkttaatttaagcttcttttttttttttttttttttttttttttttaagaaacagagtcttgctctgtcacccagttcagtggtgcaatcctggctcactgcagccagaactcctggtctcaagcaatcctcccgcccccacctatcccatgttgggattacaggtgtgagccactgcacctggccaaatgttgtttttgatagctatttggcagatatttatatttacttgacaaagaactaagcaaggagattgatgaaagtcatgaaaatgaatacatttctgtctatgtcttgcaggaaaataaagtcaaaaagaaggcataaccttatatataatagggtcctaacttataaataggttatattgtaacagttatctgtaagtcagttgtctggatcttagaacatgtatccacayatctataacrgtatctggcacatagctggtgctcaaaaaatagttcttgaataaatgaatgaacaaatggaaagtgcaaatggctgttatattccctgacaacgagaagaaactgaatatgctttgtgatggttagttttatatgtcagattggygaagtcatagtacccagtttattcaattaaacacaaakctaggtgaaggtattcyrtagatatggttaasagctacacttaattgactttaaataaaagagataatctttcataacttaggtgggcttcatccaaccaggtttaaattttttctcaaagtaaaaaatatttttaaaggagggtaaatggctgggcacagtggctcacacctgtaatcctagcactttgggaggccaaggcaggaggcttgcttgtgtccgggtgttcaagaccagcccaggcaacataatgagaccctgtctctataaaaaattaaaatatcagccaggtgtggtagcatgtgcctgtggtcccrgctacttgagaggctgaggcaggaggatcatttgagccttggagtttaagggtgaaacaagccagaatcgcaccattgcacaccagcctgggtgacacagcaagatcttgtctctaaaaaggttttttaaaagaaggagggtaaatggagtgaaagtgtttaaagccctcacattgtccagaaactggtgacaatacttayattacaattgtaattaagcaaggatttgtattataatctctggkgtaaccattaaaagagtagtaaaacaatgaataacaagctactggcagggacatgggggatagaataattttaaaaactactccaaataaaggcaagaaaagtgaggaaaagtgagcatacaaaacagatgggataaaatagaaacaaatagtaagatggcagacaaayccaaatatgtctgtttacactcaatgtaaacagattaatcaaatgagaatagttgtcagactggaattttaaatgattctattttgataccgatagtaagacattatttgccttcttcactcttgacaagtgcactcatggtggggaaagtaatggtgggataaactgctggcaccttagcccaagtcaaggtggtagcaccagatgtattaataaccattttacttgtcaacaccagagactcacacacacaaaaaaagtcaatttcacttaagacggtccttgatgggccgggcgcagtagctcacgcctgtaatcccagcactttaggaggctgaggcgggcagacgacttgaggccaggagtacgagaccagtttggccaacatagtgaaaccccacctctactaaagatacaaaaattagccgggtatagtggcacactcctgtgatcccagctactagggagactgaggcaggagaattgtttgaacccrggaggcgaaggttgcagtgagctgagatcgaatcactgcactccagcctgggcgaccgagaaagactgtgtctcaaaaaaaaaaaaaaaaagtccttgatgaagcattaaacattaattttatcaatctcaagtacagttatttttagtacataaagaatttcagcagtcttctcctactgccctgtcttcatatacaaattgcctcttgagaattctaataaatggtcaattcattttagcctgaatggtacaaggaacagggaaggtattcttacagtagagtttaacgtggggtcacctacccctactgtcctcttagtaccctgatcagcctctcggtacccccagagaacagatgcttacttccatgcaaggaaaatggtgtcacctttgaccatgttagttgttaaaggcaatttttcaacaacattctaatatcttagaaaatatttggctaacaaagcgggatatttcataaaagttataaatcagataatactaaagagttaggagttctggctgggcacagttgctcaggcctgtaatcccagcacattgggaggtcggggtgggaggtcgagagttcgagacgagcctgaccaacatggagaaaccccgtctctactaaaaatacaaaattagctgggcatggcggtgaatgcctgtaatctcagccactcaggaggctgaggcgggagaatcgcttgaactcgggaggcggaggttgcagtgagttgagatcacaccattgcactacagcctgggcaacaagagcaaaactccatctcaaaaaaaaaaaaaaaaaaaaaaaamcaaagagtcaggagctctccatgtttaagataatcaaatccacattttatggttgtatacattttatttaaccacacaatgagcacacaaaaattaataaactactatggctcactccacaatttacacatttacacatatacatatattttaacacactccctaaatttattttcagaaagtgtaatgtgtacctcaccaatgctaagaatggtgaaaaatgcaattagatttacaacaactgcccttgagaagcttagagagagtgttgtgcctttcccgtacactaagaacttttgctctgtgactaagaaggaaactgaataagaatatgcctcatcctctttgcttttctagccaagatgcctggtggcaaggaagaaccagcatgttatagaaaaagaggagccgggagtggtggctcactcctgtaatccaaagcactttggtaggccgaggcagtgggccccatgtctactaaaaatacaaaaattatctaggcggggtggcaggcacctactcgggaggctgaggcaggagaatcacctgaacccaagaggtggaggttgcagtgagccaggatcaccctagtgcactccagcctggatgacagagcaagaatccgtctcaagaaaaaaaaaaaaatagagccgagaataaaagggttgaccctctgtttagactgacatgatgtgaaaatgcctgccatgtttaatattagtcacaaagactcaaagagccaaaatattatccgatggtctctaaggtcatatttttgaagagaataatttctgacgaagttgcatttcttaaattccaactagttaccattaccagggatgttcagggtaaaaacctgctgaccagcttctctggtagatcttatgcaaacaaagtgtgttccaccatcaaaaagagacggattcaaatgcatacattgatatcaaacaagcagtttgcattgtttatattgtgtcggatttgccaaaaagcacaaggtttctaaagcctctgaaggctggtgtcatccatcggtatccagtaggtgctcccaatttggaaaatgatgggaatcatgtcacaggaggtattttttaaatgacttctataactagtcaataaacttgtcaatgacatagaaaaatctattcaatctacttaacatgttagaaaagtaaaaaggctgggaaagcccaagtttgaaaccttctgaggaataaaaagcatgcctactctagcagaaggagatggatttaagctaccaacccaagaattttaaaaatggaacttttaggctgggcgcggtggctcacgcctgtaatcccagcactttgggaggccaaagtggaatgatcacttgagctcaggagtttgagaccagcctgggcaacatagcaagacctcatctctagtaaaactaaaaaaaaaaaaaattagccaggcgtggtggtgcgggcctgtagtcccagctacttggagggctgaggcgagaggatggcttgagcctgggagatcgaggctgcagtgagccctgattgtgccactgcactccagccagggtgacagagccagaccttgtctcaaaaaaataaatactgacaaagaagaattcttatggaggggtgtgtgtgtgtgaatgagtggttaagaggatacgacatataacactgtttaaatactaaataaaattgtcctcacagaatgtactatcttcacatacactttctcttctcttcgttttcttgtttctaatttctttgccaaatgctagccaatatttgtttaaatttttccttcatagatatacatcaacaataaaacttttatttaaaatttttaatcagtatatacacagtcttacatttatatgccagtagaaaaggatggtggaagccaaatcaggaataaatgagaaaatagcagtgaccaaaaacaaaacctcattttataataaaaagccgatcagtcacataatgccagtgatagcagtcactgaagccttactgtgtgccaggcaccgtccagcattttcatgtgctgtcacacttgtggcttatgacacacctaagtgtgtcagttgggtcctctgaaagcagatggagctaggagtacaagaggttaaccgtgggacagcactggtgaaagataaaagtcagaaaaagcaaggctgggcagggaaattcttcagaccgtgctgcagatctgacacctattaaaggaaagcggggaagtgggtttgggcagggagagtctcagaccgcgctgcagacctgacaaagcctgggccaatctgatcagcaactctggacaagagctggccagtagaggaggctcatcttaggctgcagtgcccaagcccggaagccactgagctcagtcactagctgggggctaccttaggagatcaaggtctcacctccgaaggtgagacctcgttccaaaggtgctaatggctgaaggcatctgctgactgcgctccttaacggctgaacagcgagccctttcttgaagggaaatctgagtgccgctcctccatggctacctcagtaagggaggctttattatgattcccatttttcggaaagaaaaagggggcacaaaagttatgtaaatttcccaaagtcacacagctagtaaaaagctaataaatgtctcctatttgccttgcagctgatagtaaaagtaactttttttttcttttctttttttttaagatggagtttcactcttatttcccaggctggagagcagtggcacgatctcagctcgctgcaacctccgcctcctgggttcaagtgattctcctgcctcaacctcccgagtagctgggattacaggcgcccaccaccacgcccagttaatttttgtatatttagtagagacggagtttcaccctgttggccaggctggtctcaaactcctgatctcaggtgattcgcccacctcggcctcccaaagtgttgggattacaggcgtaagccaccgcgcccagcctccctaacacattagtgtatggacttccactcactcctctctagtgtattttggtttttttcaaaaaataggataattccttaaatattaccttagaactggtttttcttcacttgatatcataaacatcttttcacatcaataagttcatttctacaaatgtgtacatacaactctagcacaatttattcaagtaatacgctactgaacccttcagttttttctcttcctttttttctatatgagaaacaatttagtgaacatccttgtagctaaatctttgtttgcaatattctgagataaaatgcataaaacccaaaatttaacattttaaccacgttcaagtgtacagttcagtgttttgtgtatactcataaggttgtacaaacatcaccactaattccagaacgttgccatctccccataaagaaactccatacctattagcagtcgttcccaattcctccctacccccattgcctggcaaccactaatctagtttccgtctctatggatttgcctattccggacatttcatataaatgggatcatatyacatttgttcttttgtgtctggcttgtttcacttagtatatagtatttccaagatgcatccatgttgtagcatatatcagtgcttcattcctttttggctgaactattttttatgcctgaattagtattccactctttggatgtactaccacattttgtttatctattcatcagttgatggacattgggttgtttctaccttttggctgttgtgaatagtgatgctgtgaacatttttggaygagttttgatgtgggcatatgtcttcagttctcttgggtatacagctagaagtggaattgcaggttcaatctacgtttaacattttgaggaaccaccaaacttttccacagcagctgtgccattttccattcctaccagcaatgcattagggttctaatttccatctgtgccaatacttattttccttttccttattattattgccattcaattaggtgtggttctgatttgcatttcttcaataactaatgaaggtgagcatcttttcatgtgcttattggccatttatatatcttcattgaagaaatggctatttaaatcctctgcccaacttttttcttttcttttcttttttttgagatggagtctcgctctgttgcccaggctagagtgcaatggtgcaatctcagctcactacaacctctgcctcctaggttcaagcattctcctgcctcagcctcccaagtagctgggattataggcatgcacaaccatgctcggctaatttttgtatttttagtagagatggggtttcaccatgttggtcaggatggtctcgaactcctgacctcaagtgatctgcctgcctcagcctcccaaagtgctggattacaggcatgagccaccttgcctggcctttttttcttttttttgagatggagcctcactctgtcacccaggctgtagtgcagtggtgcaatcttggctccctgcaacctctctctcccagattcaagggattctcctgactcagcctcttgagaagctgggattacaggcatgcacaaccacatccagctaattttttttgtattttttttagtaggtacggggtttcaccatgttgaccagactagtctgaactcctgacctcaaatgatctgcccgctcagcctcccaaagtacagggattacaggcatgagccaccatgctcagccctttgcccaatttttaattggattgtttgtcttttcattgttgacatatgaaagttatttatatattctggatagtatgcccttatcacagaaacaatttacaaatattttctcccatcctataagttgtgttttcactttttctttttttctttttttttttttttttaccttttcttaaatagagttggggtcttactatgttacctaggctagtctcaaactctcaaactcctggactccagcaatcctcctaccttggcctcccaaaatgttgggatttcagctgtgagccaccaggcccggcccttcactttcttgatagtgtcctttatacacaaaagtttttaattttgatgaagcccaatttatctttttttcttttgttatttgtacttttggtgtcatatttaagaaactgttacctaatccaaggtcataaatatttatacctatgttcccttcaagagttttatgagctcttacatttaggtctttgatccattttgagtaaattttttttatatcatgtgatacttcaagtatctactttggatagattcctaaaaagtgggcatataatgcttcaggagtggttttgatttgggtttttttttttttaagagacaaagtctcaagtcttgctgcatctccaaggctggagtgcagtggcacgatcatagttcactgcagcctagaaatcctgaactcaagcaatcctcccacctcaacctcccaagtagctagaactacaggtgcatgccactatgttcaactacgtttttttattttttgtagagacagggtcttgctatgttgtccaggctggtctcaaactcctggcctcaagaaatcctcccactttagcctcccaaagtgctgggattacaggtgtgagccaccacaccaggcccagttttaaacacagaagctgaatttctaattccagtcacagttccatcatcaatgaggacaaaagaagtaagagtgcatgtatttaacaaaacattatatttttctttgtaagcaaatgactaaaattaacaagaaattactggataactgcctcactcatttgccatcactttttccaactgctgctcctactgtcttaattacttttgtctggtgctttgcagaactgtcactgcgaggattcattttggaccttaactgtcagatcactttagccaggtttcatctcctgctaaagattccacatgaagagatggcataaaggagctggtgggtacaaggctcttcacagacatgcaaacctggagaaaccatctgtggccagcattccttgttcatctaagaaaatacatgttcctttataatctagttttccaaacatggatcacctcctcttcccctaaattttctttccttgtagctacacaaatgaaaccactcaagttcccatctcttctccctgccagtgttgcatcgggctgataatgctggacgggagaaaacaaacctctttgactcttccgccatctactgacatggaaaactgcctatgcggcagtgaaacataaagaactaccggaaaagaggaggacctagatgctgagccctgatatggaagacaaaagaccaaggttgttactgaactgggggatggggatggagagctggatttacaagtgatgtctttttaaaaaaaaaaaatatcttaggctgggtgcagtagctcacacctgtaatcccagcactttgggaggctgaggtgggcagatcacttgaggtcttctagtacttggcaacatctattactgcactgctaagttatggaatcacatttgttttccctgaaataagttttcttggcttctccatccactgataatctctcccacaatattgtgacttgattctgttccaggtgaaccttttcctagtatttcttgtattctttattatctgtcatgttagggcagctgtggagcttcatttttacaactgctgaatctaaatttaactgctgattttctaccatccattttcaaccttctttaaaaagcctggtgagtaactttatctgtcatggcccatttcaatgccctcaatagtaaaaccggcgaatgtggagacccatccttaatgaagagaccagtttggtcattcttactattttccatggattttcaacatgattaagaaaaaataatttgaggctgagaattgtagttacccaactgaatggaaggcaaaggaagaaactagacgctcccaggtaactgcccagtttttgtatttgtttttcctttccaccaatgacaaggtatgctcaataactttactcccgaaggaggatatcccattctgaaaaacacaccactgtatgcgataaaggcagggggaggaaacattacactgtgggagagggaacaaacgtttgatcagcgtgtaacagaaaacagttctggcaactattatttcttcttctccctcaaatccaggaaaggtccataggccattttctgtaatatttcaccaaccaaaatgatctcttggacttgaaaataaacgcccccatttccaaccctccatcactctaaaattattagtgatcttcaggtacttgaaaaagtaaacttctggccaggcgcagtggctcatgcctgtgatcccaacattttggaaggccgaggcaggcggatcacttgaggtcaggagtttgagaccacccttgccaacatggtagaacgccatctctactaaaagtacaaaaattagccaagtgtggtggtgcacacctgtagtgccagctgcttgggaggctgaggcaggagaatcgcttgaacccgggaggcggaggttgtagtgagctgagatcgtaccactgcactgtgacagagcaggctccatctcaaaaaaaaaaagtaaactaaacttcttattgaaatgtaatgcacagagaagtatgcagctctctccaaaccttttttatctctttccaattatttttttaaaaaagtatatgtgccccagcatgcttccttgttatgaactgtgcacaggtaggactctgctaatattatgtaaattataaaacatatacaaacaggacaggagagaaaatgaggaaaaatcaacagaaataggagttctaatttttactttgcacacttcaatgggccagtcttacatataactttagaaatcacagctttaaagacagtggcaacacgctgcattcacaaccaggttgactggaggctttaggaaaggtttggtagcttctggcctcaatggtatgacatcaactcaatctccaaaaatacactggacagaaatccagctgtcctaaaagtttagaaatgtggccaccatgtctgtgatatccaagggttgcaaatcacattgcatgtctttatccgcaacggcagtcttctaggaaaatggcatttggggaaggaagaaggtggatacaaatataccttcttcctcctttgtgataatataaaattaattacagaaaaagtaagggttggctcttagctgttattaaagattaaaattatcttggtcaaagggaaatagaaattaggttctccaaacttttaaaacgtgtttctaaggtttacagttgaggtgaaataattgcttagctgactgtggatgaagcaatgaaataactccagttttaactcactgggtaaccattaggtaagcttctgcatctataaaaactgtgttaaactggatgtgcctacaacactgagtatgacgtgtaactagcaccacctagtggacattcatatggcaatacgcgataaaggaagctgcatggccaggatggaaaagttgctggtcacagtagcagcaaagggcttagctagttcttcctggcagcctcctcartaattcatagtttactgggaatcatatatcaaatagttttagctcttcagaagaaaatgaaatttataattaactgcattgcccgggtgcagtggctcacacctgtaatcccagcactttgggaggccgaggcaggtggatcacaaggtcaggagttcgagaccaccctgaccaacatggtgcaaccccgtcaaatacaaaaattagctgggcatggtggcacacgcctgtaatcccagctactcaggagaccgasgcaggagaatggcttgaacctgggaggtggaggttgcagtgagcygagatcgtgccattgcactccagcctgggtgagagactctgtctcaaaaaaaaaattaactgcattatgacagacttttttccttttagcaattgaaactggcatcccaaggatgctctagatacagtcataaagataatgcttactgcatctctcatcactggcttacttggaaaagaacaaaaaaaaaaaagttataaagaaaatctgcctggaccaggggtgatagctcacatctgtaatctccgcactttgggaggccaagacaggaggaaggcctgaggccaggagtttgaggccagcctggccaatatagcgagaccccagctctattagaaagaagaagaagaagaagaaaatctgcctgataaagagctaaagaagcagcctcaagctgctagagccacaagcgcccctggaactgtgcacttaaatagcattgtctttagcactagcataactgggcaaaaggagcaccatctctgtaacctataacttgaatggtgcttgcccccttggagttgttcaaggagtctagactggccaaagcaggcaaccggcctggcttcaataactatgcttggaactttgggccttgaggctaagaggtgtgttgtactatttcagcatgttttatgaattggttccacagagctgttacagcacagccaaattttactcttcaaaaaccatcctaggtattttattctctttgaagcaattgtgaatgggagttcactcatgatttggctctctgtttgtctgttattggtgtataagaatgcttgtgatttttgtacattgattttgtatcctgagactttgctgaagttgcttatcagcttgaggagattttgggctgagacaatggggttttctaggtatacaatcatgtcatctgccaacagggacaatttgacttcctcttttcctaattgaataccctttatttccttctcctgcctgattgccctggccagaacttccagcactatgttgaataggagtggtgagagagggcatccctgttttgcgcccgttttcaaagggaatgcttccagtttttgtgcattcagtatgatattggctgtgggtttgtcatagatagctcttattattttgagatacgtcccatcaatacctaatttattgagaatttttagcatgaagggttgctgaattttgtcaaaggccttttctgcatctattgagataatcatgtgatttttgtctttggttctgtttatatgctggattacatttgaagtcagtgtggcgattcctcagggatctagaactagaaataccatttgacccagccatcccattactgggtatatacccaaaggattataaatcatgctgctataaagacacatgcacatgtatgtttattgcggcactattcacagtagcaaagacttgaaaccaacctaaatgtccaacaacgatagactgcattcagaaaatgtggcacatatacaccatggaatactacgcagccataaaaactgatgagttcatgttctttgtagggacatggatgaaactggaaaccatcattctcagcaaactatcgcaaggacaaaaaaccaaacaccgcatgttctcactcataggtgggaattgaacgatgagaaaacatggacacaggaaggggaacatcacacactggggactgttgtggggtggggggaatggggagggatagcattaggagatatatctaatgctaaatgacgagttaatgggtgcagcacaccaacatggcacatgtatacatatgcaacaaacttgcacgttgtgcacacgtaccctaaaacttaaagtataataataataaaatttttaaaaaatcatccttgggtaggcctacccgaaacaaattaacacaggaacagaaaaccaaataccacatatactcattcataagtggaagctaaaccatgggtactcatggacataaaaagatggcaacaacagacagtggggactactggaagggggaaggtgacaagggttgaaaaactgttaggtactgtgcttactatctgagtgacattcacaccccaaacctcagcatcacgcaatagagcccagtaacaaacctgcacatgtactccctgaatctaatataatcattccttcaaaaaatcatcctgagagcctatcttggccaccctctggatttcaacatactttttgtgcagcttaattatatctggcatagcttcatgccctctctacaatttcccaatcctgggattcatgtgctgccaaagcataataatcttgtagtgaatacatattctcctttaagcactgaaacctaagaaagctttgagcttttttatgggggcagaggggtggttgttgatgtgaactgtttaagacctttcctgtgttcatcataactacagatcaaaaaagttttcattcttagcatatccaattagacttcattcctaaagattaaagaacaaatgagggaacaagtttatcattaggtgcttatcactgtgcacctattataggccaggccctctatgatcctcattttgctcttactacagctgtgtttggtattatttcctccacttacaaaggaaatgagctcagagaaaaattatcaaagatcataaagccagtaagtagcaaaaccaggatttaaattcaagtctcctgactctaattccattgtttattcatctatgccctggtgatattaactaataagctcacgtgccaaacataacccttacccccatccactacatacttatttctgaatagaaaataaaagtcacacacaattaaatgacaagaaaaaagccccacaatcttagtatgctacgattctcaaaaaggacttcacgattctagccacacgatttctcaagcatcaagggactacttagaacacttagtagggccttgtacgtaggtgctcaatgaaaggttgttttaaaagtctcacagtattaccccacagattattttgttcatttacaaaagaaaagatatatactttaaaatggaaaaagatctggcgatcttaacccagcgattaatcttagcatcaccaacagtgggacaacctgacattgtgtgcttcttgacatgatgcagtaacagaggcaccacacaatctatgctatatccttgccaaaagtaaaatccacatctactaagaaaacaaccaaacctggacaacatagtgagaccccatccctaccaaaaaagaagwtagccaggcatggtggcacaggcctgtagtcccagatactcaggaggctgaggcaagagaattgcttgagcccaggcattcagggttacagtaagctataatcatgccactgcactccagcctgggaaaagagggatattctgtctcaaaataaaaaataataataataaaacatagccagaaaaatccaggataggggatattttacaagacaattggcttagacacttcaaaatgttcattgccatgggcagaaaaagcagaggactattctagattaaaagaggaaagatataaccaaaagtatgcctgaaccttggactagaccccggatgaggagaaaatgttttaaaagacactttgggatgatagggacaatttattccatacagatctatcatattggatattgagttattcttaatcagctcagatatggcaatgacattatggctagggaggagaatattcttattcctagatgaatgtgtatttaggggtgaagtatcatggtgttacaatttactttcaaatgattcagcaaaagaaattagataaagcacatatggtaaaatgttgcatttgtggatctaggtgaaagttatactattatactattctttcaacttttctgtgtacttaaaatttcttcaaagtattttttaacattcttgaataaaattcaagacagttgggataaattcaactcttctaagaatatgatttctgaaaataccaggttgtaagcaatcaatcaatataaatatttattgtgaccctgctattaatatatcctaatcaacccctctgggagctgtagtggtgactaaacagtgcttcatgctctcttggaacccatgtagcatgttattttgtacgtgtgtgtgttggaagaaagaggaattattctggaatgcttccccaagtaatgcctcagcttaaacctgaaggataaataagtaggtgttgcctagttataggatggtagggaaacgggtcagagaaaacaaacaggtgtgaaggcactaatgatggagttggccaatctggagagtgagaatatttactcctactgcttcctccaggcccccactctttttagatagcctgttggtctcctggttccattaaccaactccctctattcaatcttcagacccaggagtagtagtaacaggactccaatgttactagtcccaagaactaaactcaccctgaggtttccctataccctacatacaactttgtaaaggtccttttattaaactttcctcaaattatccaatttcagtaagccatctatttcctgccagcaggactgataaaaatctctagagacagatatgggagatgtctgcatatttcatatggtatctgggaccatggaatggagataatctaggaagaaggctgaagatgaagcctgggccagtgagcatctgaggtccaaggaaaacctagaaagtgtgttttcaaccaagagtatttcaagaaagaaactgtcaatcgtattaagtactgtggagaggctgggtaaataagataaaggctttggaatgtctcatgaagaagccatcagtgacagatcaacattgaagagatttgtaaagttaattggaggccaagtatacacttacttgaggggaaaaaaaaaaaaaaaaacagtatggccaggcatggtgggtcacaccagtaatcccagcactttgggaggctgaggcgagcagatcacttgaggtcaggagttcgagaccagcctggcaaacatggcgaaaccctgtctctaccaaaaaatacaaaaattagccaggcatggtggcacatgcctgtaatcccagctactcgggaggctgaggkgggamaatcccttgaacccaggaggcagaggttgcrgtgagcygagattgagccactgctctctagcctgggctacacagtgagactctgtctcaaaaaaaaaaaaaaaaaaaagaaaaggaaaggaaaaaaaaaaaaagtataatttttcaggtttctattttaactctaccaggaacttactaaataatttgagattttttagttttaattattttgagatttaaatataaatgtaagcaaaaacaatccttctcttttatttgcaaaaagccaatactggctgggcgtggtggctcacgtctataatcccagcactttgggaggctgaggcaagtgggtcacctgaggttagaagttcaagaccagcctggccaacatggtgaaaccctatctctactaaaaatataaaattggctgggcgtggtggcaggcgcctgtaatcccagctactcgggaggctgaggcaggaggatcgcttgaacccaggaggcggaggttgcagtgagccgagatcacgccattgcactccagcctgggtaacaagagcaagactctgtctgaaaaaaaaaaaaaaaaaaaagccaatacctggagacacagttaagctaatataagccatagaagtttagagaataaatgctgtaaaacagaataaatcattttcccctttcagataaagagcaggctttcgcaaaaaaatcttttgtctctctctaaactgaatgactaagttctttcatgctaaagcttgcaactaagtttgtctaagaccccctagtcaacatacaataacaagcagtttctaaccagggtgtaaggtatttgatacctaaagcattctcatgactacaatgagtaaccaaactccacagcttgagaaattgttagacagaacccgcagatccctttctttgagaacatgagcctgtgaaattatctatctttgatctaatttggctttctcctcccttccgagttcactgaacatcacacaaaaatgattgcctggccactacaatgctaaatctggggcactaggaaactgttctagggacgctgaatagaagagctcccagggtaccttctattgttcactgcagagcagccaccttgatgaattgttttaagatatcgtttcactaaacctccagcagttttctccacaaaaagacagataataggtactttgaacattatcaaaattaaaaaacagaatttgatttaagttaaagatcaacgtatctgcaaaagttaaacttgcccctcatttcagccttcagaaagaagggaggcaagaagagacccagggaatagtttccaatgagggttaggacagcattactgcagcagacaggagacagtttagagaacaaaggctttcaaataagaaaagcagattctttcattcaagttacatgacctcctggcacctcctcttaccggtaaatagatttttttttactttgcagggttacttaaacaatgtttaaaagtgtctggcccaacagtaggtcttttcttttttttctttggaggtggagtcttactctgtcacccagactggagtgcagtggcccaactcagctcactgcaacctctacctcccaggttcaagcaattctcctgcctcaatctctcgagtggctgggaccacaggcgcatgccaccatgcctggctaatttttttatttttagtagagacggtgtttcaccatgttggcctggttggacttgaactcctgacctcaagggatccacccgcctgggcctcccaaagtgctgggattacaggtttatataagccacagtgcccagccagggtttttcatattgtgagagccatttttctttttacttgctacacaaagcatttgcattgtagggcgagacgaccaatttaaagagattcagttaaaaaaaaaaaaagctgtgacaaactctaggtgccttcccattagccccacccgcacctcttggtatccaatccttcgtatgagcctctccccttggatatgggcaggacctgaaaagacccctcttgctggcagcttggctctcgacacttgctggtagtgacagtaatcatgtcagtggtccagtcagcagccaggccatgcagggagcacccagctggcaaggaactaagcgggggcctccagctgacaaccagtgagaggtctggacactcagtcctgcagtggcaagaactgaattctgccagccgagtgaggctgaaatgagttcttcccaaatcaccaggtgagaatgcagatgagaccatgagctttctaaaggacctatctaaaccatgctcagacagaaactgagacgcatttgttttaagccactaaatctatggtaatttaggacatagcaatagataatactggtactatcaacttccttagttaccttgttaatttcatagtaactgtattaggtggcatccagactatcccaaatttaaatactaacagtagtataaaaagtctggccctttattacctttcccaggtaataaaacaactggtttctaaaagtttgatatggattacacctcttaggattcctcataatcctgtgaagtagatattcccattaattatttaactcaaatgactaacaaggggcagagctaggaacttgagaaccagcatccaacccctgatgccaccacccttccaacttttatagtttccctaaagtctcaatgatgcttcccactatgcccatagatagtaataaaaccacagacagtaaaaagtactgggaacattttgttcttccttttaaatccatcttatccactagattaataattgtgcacatcagttaaaatgtcttttattccaaagtctatgtctcagtgaagaggaatttattcccttcatggcttgttattaatactaagcacttaaactgagtatatgtgaaagccaaaaacattattcttactgaagacctgtcaaacaaagccacaaaacagctccttttattttctagtaagactagatttattcaataccctagtaaaagttttgattataagtatccaacagtataaaaagtacaaaacagatctgtagatttctaatatattaatacaaagtgcatgactacatacagtacatcctacaggcaaagagaggtggaaggggaaaaagaagactgtggttgaggtctagtaataaataaataaatacagaagtagagatgatccatattatagtatattctaccaccaatactgcagccaaaatgtacaaaaaaaatcatttcaaataactcaggaggatgataatggctggacttttgtaattcacctcaaagactgtgggagagccaactcaactcactgtatagtctgtgcatatggtggcttgtagcatgtaggttttttccaaaagaaggaaatataaaatgtttagattaagaactataaaactacagggtgcctataaaaggtggcttactccttattgttattatactatccaatttttaaaatgcagtttaaaaaataagcactgagtcttgttattacaaggcaggcaaatgtttctccctcattttgaaaagactgaactggcaatgcttttcctgaacatttagaaaagaggcagtaagagtactctggtttgggttcaagtgagaggcttttcatgaaaatcttaggattgaagagctctaagttcaggatatctcaatgttcagaaagcctgactaaaagaagccaaaccaaaaccatttaatgtgaacacaaacctcttttcttttagtaagttttacttttaatacagagtgaaagaaaataaaaatttaataggctaaaacaagtcaaacacccattctacacagataaaaaccttcacaaaggtcaactgaagtaatccagagctgaaactgaattgtgcagattttcaatgaagtcacagaagtcatgtaacacaaacaaaagtcgattatatttacacactcagcaagccctctaagaaatgtgccccaagaagcattaacctttgttttgtgccatcctgaagacttgcacattttatttttcagatagcttaacatttttaatcgagtgygttctctaccatgcggtaatgctttggtactattcatacagggtcttgcctatcctaaagacttgccatttccccaagaggagctttgattctgctttagaagttttacataaattaaaatctttatcaaatattaatatgaagggaggcacaggatgcaacatatatagtcaagttacctctctgtatatttagaaattactttctcctccaaggtatttgcaacagaaagctcagtctgtcctgcttaataatcagtagtacaggtgtgaatcatcagaagcttggcaagaccttaatatttcaaaattattaacaactacctctaggggcaagttcatgttactgagttatgacaaatttattatcatgagggaaaacaagagtagccagccatcttaaaaatgccccaaccactgcttctcaaaacagaaagactaaaaactacatacagtttatcatacaacaaatcccatctctgtcccctgaaattcccctagtttcattcattagaaggggattaaaaaaaaaaaagacttaaagagcactttacagcagcattcagctttcctatgaaatactcagcatcttaaatattatatacaactctttttttagtaagctagacactggcttcagagtttgtgggagtgggggaaatcaacccattcaaaactactctagaaattgtcttttggcagaatagcaggtatccaagttaaaaataagagggtcatttaagaccagcctggccaacgtggtgaaaccccgtctctactaaaactaaaaaattagccgggtctggtggcgggcacctataaacccagctacttgggaggctgaggcaggagaatcacttgaacccgggagacggaagttgcagtgagccaagatcacgccactgcactccagcctgggtaacaagagcaaaactccgtctcaaaaaaaaaagagggtcagtttgtagctttgtggtttttcaaaattcagatatttttttttttgttccccttctacataaaaacctcagtcaccactcctgagtggagatgggcagaggctctggcccctgctcctctggcttctcagcagctgctttcttattgctgcagcaaggcttgaagagatgtgtgtcaatgaggacttccccaaaacggcctttatagatgatcccacaacatatcttctgtctaaaagaaaaaatggagaacaagatacattaataaggaagaaaaataggaatacaaaagaaatctactcactattataactagtccaatataaccaaagagttgtgcttctacaatcttgcacattccaagtgaaagggctcctagagtaaccccaattagctagagaaggggaattacccagttgccttaaaggccacactggaatcttctcaaatattgaggaagacggcattttgaaagacagcagtcagtttcaaaggctgcccctgatgttgttaactatttcctccaaaatcaccaactcttgaaaaaaaaatcagccaccataaacaggctgatgcagctagcaattttttatatatatttaattttttttctttatcaactcctaagtgcttgagtggtaatttttaattaaatactgagtagataaaaatacatgtgtgggccgggtgtggtggcttacacctgtaatcccagcagtttgggaggctgaggtgggcagataacttgaggtcaggagttcgagatcagcctggccaacatggcgaaaccccatctctactaaaaatgcaaaaattagccaggcgtggtggcacgtgcctgtagtcccagctacttgggagactgaggcagtagaatcacttgaacccaggaagtggaggttgcagtgagccgaaatcacaccactgcactctagcctgggagacagagcaaaactctgtctcaaaaaaaaacaaaaaagggtgtgtgttagcaaaggcatcaaaaatgacaacacaatgagaatgcctacagaccacatactctaagggaaaaaagatcatttcctatgaagccccctgcaggcccctccacagtcccatcctacctcatctcatcctctccccacttaattttaggtttatcactcccttttctttatacttcatggtttcaccgtatgttggcatctctaatcatactgcacagttatccattacacacacacacacacacacacacacacacacacacagaatcacaatgtattctgcaatgttttagtcaacgttgagatccatacatattgttatagagctttatttcattttaacatgtataatattctaccctgtgaatatataacacagttttatttatctactcttattttaatgtataaatcagtggacacatcttaaaggtttttactagtttatattgctggcatataggaatgggaacgtcttcaactttactcaaaaacggccatttatctacatggttataactatttacacctataactgacagtgttctcatcattccataccttctccccaacatttggtaatagactttattttagttttttcaccaatctaatgagtataaaatggtatctcattgaaattttactttgtatttccttgattttcaaaaagtttgaacacattatcatttaatgagttatttcatgattcctttctaagtgtgtccatttttctgttggtttatctttttcttccattgtaggagttgtctgtatattccagatactaatcctttgtcagatatatgtgctggatatcatttcattttctttatggtattatttgatgaatttaagttcataattataatgtaattaaacctggaggtttttttaaatgcttaagtactctgtcataaaaaaatcctttcccactcaaaagtcataatctattttctactttaatgcatctgtaattggtgtttgtctatggtgtgaggtagggaacccaagcccaatttttccacatgaataaccatgttgttcttaatatcctagcaacacttattgaacagaccattttcgcccaccaatcacccccacatcatgtatcacataacaagtgctatatacatatgtggccttgtttccaggctctctatactattccattggtttatttttctattcctagtcccaaaacacattaattaccatggcttcataatatgtcttgatttctgttagggcaagtttatccacatctttctttttcttctgaagatgcctattttgggccctttgcttttctatataaattataaattagcttgtaaagttccataaatatgttgggattttgactgcaattaccctgaatctacaaagtgatcatctccctaacagtcagtttaataatatctatgaatgtgctatacctctcaatttatttaggtgtctttaaatgttattcaacggccgggcgcagtggttcatgcctgtaatcccagcactttgggaggccaaggcgagcagatcacctgaggtcaggagttcactatcagcctggccagcatggtgaaacccaatctctactaaaaatacaaaaattagcagggtgtggtggtgcatgcctgtaatcccagctactccggaggctgagacaggaaaatcgcttgaacccaggaggcggaggttgcagtgagccaagatcacaccactgcactccagcctaagtgacagagtgagtctctctctctcaacatagacatatatttatatatatacatacacacacacacacacacacacacacacacacacacacataaataaatgttattcgacaatattgtatgatttttacataactcctccaaagggcttttgatattttactacattattttatatttcctaacactatgataaaatgtatcattctaatgccaaactgcctagatttaaatcctgctctacttactatgtaaccttaaacaaagtacttcctctttgtacctgtgttttcacataatgcttcacagaattgtcataaagactaaataaggccaggtgcagtaactcacacctgtaatcccagcactttgggaggtcaaggcaggcagatcacttgaagctagaagttcaagaccagcctggccaatatggcgaaaccccatctctactaaaatacaaaaattagccaggcatggtggtgcgtgcctgtagacccagctatttgggcggctgaggtgggagaattgcctgagcccaggaggcggacattgcagtgagccaagataacaccmctgcactccagtctgggctacagagtgaaactctgtctcaaaaaaaaaaaaaaaaagattaaataaatgcaaacaaagtggtttaaagtactttaaagtacttacactatgcactaggcactgttctaaagtgtttactactacactactaccaatattgtattggttagaaccttctgtataatgctgaatagaaatggtgatagtcaacactcttgatttgttcctgatcatagagaaaatgctttcattttatcacaattatgtattatgtacttttgtcctttttgtaagatacctgttgtctaagtaaaaaagtttccttctattcctattttgctaaaacttttttttttttaaaccttaaaggaatgttcaaatttgtcaaactccttctttgcaccactaagaagacaacaccttcctttagaaactatcaatgtgggctgggcacggtggctcacgcctataatcccaacactttgggaggctgaggcaggtggatcacctaaggtcaggagttcgagaccagcctgaccaacatggtgaaaccccttttctactaaaaatacaaaaatttagccaggtgtggtggccatgcacctgtaatcccagctactcgggaggctaaggcaggagaatcactgaacccgggagrcagaggctgcagtgagcagagatcgagccattgcactatagcttggcaacaagagcaaaactccgtctcaaaaaaaaaaaaaaaaaagaaactgtcaatgtggtaaattatattagttgatcgtctcatgttcaaaccaatcttacatacctagaataaccctagtggctgatgatatatttgttttggtatcaaacttatatcagccttaaaaatgcttggggcctatgccctattttatccatagtctggaaaagccagtgcataggctccaatcatctgttcctggatgtttagtacaacttgcctattgtggtttgtttgtttgtttgtttgtttttttaaatagagtcttgctttatcaccaggctggagtgcaatggtgcaaaaatagcttactgcaaacctaacctcctaggctcaaacaatcccctcaccttggcctctcaaaatgctaggattacaggtgtgagccatcacacctggcctgaatcaatttattatgagattatctccgtttttcactttttcttgagacagctttagcaacatgtcttttttctagtactgtacctgcttcacctgtatgttcaaatttattggcatcaagttgtctataatatcctattattttttaaatgtctgctttatctatacctaagtctcttttctctttcctaaaattgcttatgtgtattatctccttttcctgatccactttatctctagtatatttttggtcacgtctttttgaaggaccaactcttagttttactgattctctccactgcatattgtctttctactccacttatctagcaataggcaatgtaggtaccttgatgtgatttttattttaaataaattttaataggaagaacatacaaaaatcccacttccctgctcaattcctgcttaatccactgcaatcgtgtgttaccaactgtttgccaaatgccatttaattgctaaggaagtagaaaaatactgcccataattaagatggtttgctggttagagagatactttgtttcttttaccttttccagtaagtgagatctaaaaaggaaaaaactggtgttctgttagaaccagaagccatctctgtatctgagccgtcatctgactggttactgtaacaaggagattgagctggggaggcacttgaggtggtactgtgagcatcagaatctgcaataaagattaagagaaaaaataaaattttcaatttcattacatgtaattgcaactaaacctcagcataagacactgtgaaagagttggtaaaaaagaaaaagtaaaaaataattcattttctatgcactactgatatttgaagatattcagactaacgtgttttttaaagaagtgaagaagatggaatagacatacttcctattcctcctgcttatacaactaaaatccctggatattatatataaaacaaacctgagactccaaaaggtgatgatcatctagggagctcaagacccaaggcaagccatggtggtaggttccttagtttttctggattttccttttgcctcataatccccagctttggaagtgaaacagcagccacccagaaatgccaatgtgtacagacaatcaaaacaacaacaacaaaacaaaaatccaaaaccccaattaaaacctgatctctctagcaaagaactaggaaaagggcagcctagccagacagaaaacatttctgaacactaaccttcctgttccagccaaacccacggaaaaaactgtggacacctttcctaaccccagcagaggctgaggtgaagagcctacatttccaccctcacaagacttaggaagcaccccaacacctataccagggtggtgtcagaggaagcctagcgaagtcaggattttcattatggcccactaagtacaaggccaccctcaccaggtggtagcctgaactctctcctgacatccagtagtaacaaggagcctccccctccccccaacctcagatgtcaatggaggttgagagagaaactggaattctaacacctggcggtaatagggtggtgaggcccctccctctttccctgccctgaggggtgtcaaaaaagccagttaaaatagaagggttaaataagacccagagtctcacaacataatctgaaaatgtccaggtttcaataaaaaattacatcagtccaagaatcaggaagatctcaaactaaatgaaaaggccaacactaagatgacaaagacattagaattatctgaccaagattttaaagcagccacgacaaaaatgcttcagtgagcaattatgaacatgtttgaaataaatgaaaacataggcttggcaaagaaataggaagcctcagtaaaaataagatagaaaactataaggaaaaaataaatggaaaatttgtaactgaaaaaaatacaataaagaaaataaaaaccacagtggatgggctgagcaacatggaggggagagagaaaacaaacagtgaactggaagaaagaacaacagaaattgccccatatgaacgacacagaaaacaaatgaacagagcaggagaaacctgtggagcttagtcaaacatacatctacattcatgtcattgcagtcctggagggagaggaaaaagagaatagaggtgaaaaagtactcaaatatagtggctgaaaacttgtgaaatttggcgagacataaacctaagactcaagaagctaaccaaagcccaacagaataaacccaaagaaatccatgccaaaacacgtcataattaagcctctataaactaaaccaagagaaaaatcttgaaagcagccaaagaataatgacattatacctataaagagaaaacaaaagatcctgatttaataaggaataaaggcagttcattagatgcagagctaaccctgatttaatactttgcctgtttatgtgaagatgtcagataaatgtacaagccagaaaataagtttcttagttaacagtcattgtgctataaggctgttgtactgccacgtcacagcaagagcagtatcataaacctcataaacacaggtggggcctaccatacaccttgcccatcccaggacacgttgacagagcaatccttccattcagataaccaatcaagtacttattaaatatttataaggcatcaaatcctatgttacatgctgcatggaaagaaacagactaaagaaaatttgggtttttttttttttttaattatttttatcttttggttttccttgagaccggatctcactctgtcacccaggctgaagtgcagtggcatgaccacagctcactgcagtctcaacctcctgagctcaagcaatcctcccgtctcagtctcctgagtagctgggaccacaggcacacaccaccacactcggctggttatttttttaatttttagcagagacaaggtctcgttatttgcccagactggtctggagctcctagcctcaagcgatcctcccacctcggcctcccaaagtgctgcaattacaggcatggtcacacctagccaagaaaatgtttttgtttttgtttgtttgtttgtttgtttgtttaaaacagagtctcactctgtcgcccaggctggagtgcagtggctggatctcagctcactgcagcctccaacctcttggattttcatgcctcagcctctcgagtagctacaactacaggtgtgcactaccacacccaactaatttttttatatttttagtagacaggatttcgccatgtttgccaggctggtcttgaactcctggcctcccaaagtgctgggattacaggtgtgagccaccacacccagtcaagaaaacgttttctgaatagagctcacaaatattttatatttacaaatatttacataaaacagcataaaattaggtatctaaaagaaagccccgttagtatttttaatatgttaacttagcaaacaaaatcctcaagagtagcaggttttaaaaaaatgagtctagtgggatgtttaagacttcctaaataattaacatcaacagacacctctatgctgctgaggaaaactcactctcctaggaagtgcttaatatctttaaactatttgaaatttcaattatctgaccatttttgttttgttttgtttttgttttcggagacggagttttgctcttgttgcccaggctggagtgcaatagcacaatctcggctcaccacaacctctgcctcccaggttcaagcaattttcttgcctctgcctcccaagtagctgggattacaggcatgcaccaccacgcccagctaatattgtatttttagtagacacggggtttctccatgttggtcaggctggtctcaaactcccaacctcaggtgatccacctgcctcggcctcccaaagtgctgggattagaggtgtaagcctccatgcccagcccaaactgcaattttaagtcttaaaaattacgtaggatttagaaggcaccaaggagtgattagatggcatcaagtcggtagggacaatgggcaaagtcaatgagcaaagctgtggaagccaaaaacactccaggaactgactcagctcaaacaaaaataggaccttcaaacactttctaggaattctcaaccatattttatagtaagcagaaatcactgcagattttgaaaaggatgacacaaaaagaatagctaacatttatagacgaatttattttgttttacaaagccattttttacttgattatccccagttctctgattagaaaattatggttaaacgtcaagtgactccagagttacacatttgctagtgacaagagctgatattcaaatccagatctgtaactctaggtccaatgccttttcagtacaccacaaaatgtcttgaaaagggaatacagggctgggcacggtggctcacgcctgaaatcccaggactttgggaggccaaggagggcagatcacctgaggtcaggagttcaagaccagcctggccaacatggcgaaactctgtctctactaaaaatacaaaaattagctgggtgtggtggcatgcacctgtaatcccrgctactcgggaggctgaggcaggagaatcgcttgaacccagtagggggaggttgcagtgagctgagatccgtgccactgcactgcactccagcctggttgacagagcaagtttgactccatctcagaaaaaaaaaaaaagaaagaaagaagagaatacaggcctggtatgtgcaggatacacagaagcaaacacataaccagaagcacagaccatttagtgggtgatatataaaaattcacatgtttcccaactgcttcaatgcacaaaggtgccagcaatttatactgtacctggtgaacaccctgtttcagtctgagcctccacaatctacacaccttattatcaaaggaatttattttcagtctctaactactacacagcacagtttcataataaaaatctaaaattacactgaatattcccttaagtaagacaaaagtgagatatcactttctctataattaagggaaagggctaagaatatacatatgaataatcagttcctcggccttcaagtgataaaagaaaattaatgtttcccaaatgttcattaaaacatctagtgaggactgggtgtgatggttcacacttgtaatcccagcacttttgggaagccgaggtgggtggattgcttgagctcagtttgagaccagcgtgggcaacatggcaaaacccaaactctactaaaaatacaaaaattagccaggcatggtggtgcatgtctgtagtcccagctactcaggaggctgaggcacaagaattgcttgtaccccagaggcagaggctgcagtgacccaagatcacaccactgtactccagcctgggtgacagagcgagaccctgtttcaaaaaaaaaaaagaaataaaagaaaatatctagtgagaatggaaggtagagttaaatctttagggagatggggggttgagagctggttaggaaaggtaagtgtataattaaaatacatatacaaatttatatttcctaaatattttacatctctaccacttattaagtggcccagatcaagtttaaatcacctctttgtgcctcctattctgagctctaagatggaaataactgagattacatatgtaaagtgcttagtataccaaaatgctcaaaaaatgttgagttctcctgcactcctcactttaccgtcactaaacttagatgtctttttccattattctaaaacaagcatgataaccatgtcttgattgataatgttctctctaacagggccctatagattttttaaaagtactgagagctccaatagagatccacaacccctagccgcaattctgagaaagctctggaaacagaaagtatattcctaacctatttggccacaaaatctggcatgacctaaactatgactataagcagacaaacctgactagcctatgtaccatctatttattccactaaatgtgaatactgctactttttgctgtaaaaatactaatgtgtttggttcaataatgctccttcaaaccccaagggtaatagagatatttattagacaataacattatatgcagtgtatttccttttcaaaatctaaaatctcaattccaaaatacagatgtgccattacagcaaccccccaaaacttccaataatagcatgtgacctgacattaattaattagacattcctttctcattctatcacacaacacacactgccccttaaacctgaaagcaagccctgaggttggctgaatttcaatatgtgcgttatgatttctaaagttactttccagaaaatctggactttggtctcagattgtcccctttacgtaccttcttgcacatctgcaggactcaatttccttatggataaaaatcaagtaaatgagctagaaatgcaccttctagaaaattaagatgtcaataaagacatcagggtggtctcagtacaatctgaagtggttagctagtagaaatactctcttgagacatcaaaatcagaaaaagtgccaacatttcacagaaataagataacatctctaccaagtcaacgttgccttccagtgctctttataaaaagcaataaaggaaaaaatgatccacacatgccatacaccacccccagccaaaaataacaaaacaattattaagtactaatgttgtaatatcaaacttactatgaygtttaaattccttctgcagtttactgatctggttgcttttyatcctgttcccagatagagttttcactttctttggtttcaatgtagtctttagactgggtccagcccttgcatctaccacctggaagaaaatactgaatatttaataatatttttaaaatgacaccagtgtatccctttggttcagatccgtgcctatttgagaaccacagttttatactgaaaagaggatgaagctccatgtgcacctttaatcatcacatgacataagggaataaataatatttatctactggggtttttaaagatattctttcctgtgaagtgggtaatagtgggagtctattggaaaaaaatttaaatagatttgtatatgggataatcattactggatgacccagctaggttaagaatcaaacctaaaaacaactccatttctacaggataatgttttgcagtttacgaaaagctttcatatactttttatatttagtacaaagcaaaaaatagagctacttttgttactccaattttagacagaaggaaaacaaggcaaagataaattatgcattttgccttatttcaccaagcgagtaaatgggtaagaggggtggagaggggagaagattggaatcaaggtcttcaggcctattctttatgcttttttcactttacaccttaatctctgaggtgagttacacgacagcaatagcatgttctcccacagtctagcccagccattgatctcgccccatatggtcctgtttcttaggtattcattcacatttattagctgcagatttctaccccatgtaaaaaggaaggttgttatcatcttcaaaatcatgacctattataataacataacactgtcatcaaaggacaatgtaaggctagtgtgaacgataactgtgttatactttctatacaccatctcatccagttctcacaatagctctgtaagagagctattatctttgcacttcatgaataaatataacctgcccaaaatccacaactagtaagtggtaaaggcaaaattcaaattcaagtctgatctacatgttcattagtaccaacctgagttcaaaggatcatgttatccaaagagatttaagaaaaagaattcatgtctaattaactctgggaattactgagttaagcctaaaaacaggtgaatgcttactgtgaatctccagaagggggatattggatacagccttaaggaaatgccacaccaggctattctgttctaaagatgccaaaatgttaggccattatatctgaacagcagctagtgtttttctttattcttttcagacttttctaccctagggatatattacttcctaaattagggggaaattaatgttactttaaatacagtagaggtataattgagaaaaaagaaagatggactaacatgattccagtttttttttgatcctgctggcaacttcttccatcttttcacaagcaggacacaggcattgcagatgtctcctgaacgagtctcatgcaatctgataagaaaacaatcaaacctttatcagtctcccttaccttaaagaattcatgcaagcacatttcttttggggaaaaaactgtatctatgtatggtttatagatacaatttaatcatcctggatgatcccattccattgtttctatagaatatttcagaaataaaattatcttctagattcaacaaaccaattctatgtacggcaatttggttattttgaaataagaaatgcttttaaaattaaataggccaggctgggtgcggtggctcacgcctgcaatcccagcactttgagagtctgagatgggtggatcacttgaggtcaggagtttgagaccagcctggccaacatgacaaaatcccgtgtctctactaaaaatacaaaaatcagcctggtgtggtggtgcacacctgtagtcccagctactcaagaggcttaagcaggagaatcgcttgagcccaggaagcagaggttgcagtgagccaagattgtaccactgcactccagcctgggcaacaagagcgagactccatctcaaaaaaaaaaaattaaataattaaataggctggtgtggtggctcacacctgtaatcccagcacatcggaagaccaaggtgggaagatcacttgagtgcaggagttcgagaccagcctgggcaacacaaggagaccccatctctactttaaaatttttttttttaatttaatttaaaaaaatgcttttaaaattaaagagtaaaactcaagacctaaaagagattctgattatcacggttttaaacattgctgtttaattaatctttcttgaaatgtgtaaatatatttcttttttggtgggggcgtgggggtgaacaggatctcactctgtcacgcaggctggagtacagtggtgggattatggctcactgcagcctcaacttcccaggttcaagtgatcctcccacctcagcctccctagtagctgggaccacaggcacgtgccaccacgcctggctaatttttgtattttttgtagagacagggttttgccatgttgcccaggctggtctccaacccctgggctcaactgatctgtccgccttggcctcccaaagtgctaggattacaggtgtgagccaccacacccggcctgtgtagatatttcataagtatcaaaatgctaacctttggcaagtaaaataatgtgccataatattccagtttcgcagcaaacaaaaccagagaggcactgtagttttaaaaaatgaaaatggccagatgaggtggcttatgcctgtaatcccagcactttaggaggctgaggcagccgggagttcgagaccagcctgggcaacatggcaaaatcctgtatctacaaaaaaatagaaaaattagcagggcatggtagtacatgcctgtagtcccagctactcaggagagagaggtgggaggctcacctgaggccagtgaggtcaaggctgcagtgagccatgacagtgacactgcagttctgcctgggtgacagagtgagactctgtctcaaacaaaccaacaaacaaacaaacgattatattgctgagtaaggtggtgcacacctgtagtcccagctactcgagaggctcagacgggaggatcacttgagcccaaaagttcaaggctgtggtgcacaatgatcacacctgtgaatagctactgcactccagcctaggcaacataggaagacattgtctctttaaaaaagaaaagaaaaaaagaatgatttcccatgttagaaattactttcaccactttttcttatcaaaacatttgttgatcatttattgttaatcctggactttttaactattctgaaggtgtcaaaaaggtctgtgccaaccatgcatgcctttttaaattttatttttattttagtatcttcatttcctcaacctcccaggctcaggtgatcctctcacttcagcctccgacgtagctwggactacaggcatgtaccgccacgtctggtgagttttttgtttgtattttttgtagagatgggtttccccatgttgcccaggctggtttcaagctcctgggctcaagtgacccacctgcctcagcctcccaaagtgctgggattactagcgtgagccactgcacccggtcaagcgtaattttttttttttttttttttttttgagacagagtctcattctgtcgccaggctggagtgcagtggcgtgatctcggctcactacaacctccgcctcctgggttcaagtgattctcctgcctcagcctctggagtaactgggactacaagtgtgcaccaccacgcccagcttatttttgtatttttagtagagatggggtttcaccatgttggccaggatggtctcgatctcttgacctcgtgatccgcccgcctcggcctcccaaaatgctctcagattactggtgtgagccactgcacccagtcaagggtaatttttttaaaagcctttttaaaaattaaccacaaaaggaagtcaacaacaaaagggtttgtctagctacaactttaaggggcttcacgattaatgtggtagctcctcataatctggaaaaaagtaggctgtcagcattgtttgattcatttaaaaagcaggagacttacacagcctaaattagaataagtgatttttattattagcacattgttccaatcaccttgcttacaaatatttctgtatgctgtggtattttttcactctaagaatagtacaaacatcaggtgatcttacccaaaacagctctggaagtccttttcatagcgtttactgtcagtgaatcgagaactggaggacttagctctgcaaatacagcagccctctatacttcggtacatctttggcttgtgaaaaccaaacatcttttcttctgggcratagtctgtaaagccaagggaattgacatatctttgttgagggctgtaacaaggaaccattaaagagttctctctgctccaccccacccccaagcaacttggtgttatatgaccaagacaggcaggcagctcaagggaagacctcctggatcgacctccattcttggcactatcaaggcaagcgtataaaacacaaagaaaagcctagttatttaaggaggactctactacctcctaactcgcctaacaaacatgcaatctaaaaatggggaagagaagcattttttaaaatcaggttttgaagtaagaaatgccacaaacaatcctgtaaaataatgaagctgtacacaaytaaggatgcatccttaaatttaagacacayctttttattttgcacatttgcattaacgtgattcccctctggggaagttttgagcatttaccatgaatactatttgatactaagcacacaactagctcactatgcatcagcccatactactttgcctaatgggaattcagaggggatttcttctgtgataaatgggaagttctaagcagtcaagtttgcccctgaattgaaactgctgaagggaagatgtaaaattcacaaaaatccaaggttagaatttaataataataattccttattatcattaagacaaaaaaagaacgagctcatgttgtctgaccgctgatctgccccttagttgttagaggtttgtggacctcttctacaaggctttgtgcctgagagtagtaacagtgggaggcaaatgtcccagagacgtagagtgaaataaattgcagtcctcctgttaaaaaaaaaaaaaatctcaacgtcaaggaaggaatgaaaacagctctggggctggatgcaaatatgtagctggcagtaaatctgtaccttaggaaaagtaatttggaatatccaaatcaagggccagctcaccaaaacaaccggactaagagaggtgatgaaaaggcaatgaatatagaaactaaactccaatggacaagtcagaggatgtgtgtatgtatgagggtctaactataaattatcacaaaattatcacataaagcaacaataaaagaaaaaaatttttttttttttggagacagagtctcactctttcacccaggctggagtgcggtggcgcgatctaggctcactgcaagctctgcctcccaggttcaagtgattctcctgcctcagcctccctagtagctgggactacaggtgcccgccaccacacccggctaactttttgtatttttagtagagacagggtttcagcatgttagccaggatggtctcgatctcctgaccttgtgatccacccgtctcggcctcccaaagtgctgggattacaggcgtgagccaccgtgcccggccaagaaaattattaatatcactttcgtgtccatagttttaggagttattaccacagaacactatctttttaaagttgttttagaaataaacttagatgagtaaacctaaagcttcagtacagtcatgtgttgcttaacaatggggacacattctgagaaatgcatcattgggcatccttgtgcagacatcagtgtcctcacataaaccaagatggcaatagcctacaacacccctaggctatatgggatagcctactgttccaaggcaacaaacttatacagcgtgtgacggtactgaatgccgtgggcaactgtaatacaatggtaagaatctgtgcatctaaatatagaaaaggtacaaaaaaatatggtatcataatcttttgggaccaccatcatatatgcagtctgtggttgaccgaaacgtccttgtgtgacatatggctgtatttgtctttggattatctcgtctgatcccattccattccaattctggttagtataatatagcaagtattaatgaaaatgattcagaaccaaatatccaggctttttatgtgtatttttttggtattgaggggttttgaaatatagacagaggttttacaacttttaaaagaaaatttttttaaaacttttattagcaaataattagctaaaaactgaagcttccctttcaaacaggctattgttaataaactgttcctctgccatgtttttgttggtgagagaggcaggcaaaagagtgggatgggggcaaggcagaaggccttcatgcatttcaataattaagtctaaacagttacctctaagaactgttttaaaaaaaacatttttagttgataataattttagttaaatgcttgggaatttgatgtctttgagaggaagaaaaatgaggaagtaccctctacacagtcataagaaaagatctagagaggcctgctcaaatgaggcagatttttttttctcaatccaacaacaaacccatatgataactgaaaagaaaatcctgaagaaaatggtcgcatgttgctttggaaaaaacaatgtcaaatgacagaagattgcagaaacaagaaagcagagtagcagttattgctttaatttgtgtattcctgttttaaggcaaaatgttaatacggccctcgtcctcacaccaccctgcgctcttctccaaactcgcccaacagcttgcattaccatcaagaaggtcagagaacagttcctctaatactctccaacttcatccataactcttggaaacttcagcctcccttctcagcaaggacaaaagaagcagagcaaaaaaggccagttcattccattaatacacagaccaaatcctattacgacagacagattcctatctctaccctcaccatctctttcccttcccccaaataaacaagtcctcaaagctatcagcattcagctcatctctaggatgtgaactaccttcactgaggttggatttgaccaagacgccatagtttgtgccagttaccacactgctaagctgttaaggatgttagggttataggtgaatattgaggctttctttttaatcagcagccattgtgaattaagtgttcctcttcaatgatttttttctgctggtggggacctccacaaaacttacccagcacccctagcaagacattccagtcataagctgaggaatattcttcttagacataggggagaataggctgatrtcttaggattcataatccattttcatatagttccgtgaccttacttttgtcctgacaaaattattctgcctgaacatctgagagggatctaaatcctagggcttaccctctcctaggcaatgctcagtgagaaatgcaatgaggtggcagacacctgtccttatgcaacacacaaggagcatgtgaaccttttaatggatgacaacttaataaacctattaagccttttctgagcttatcctcacacttaagaggcacctgggaatctgcagcaaatacacaggggtttcatttcgggctttgtttacaacaaccaagttaagcagtggttggtgtttaaccatttcaaggtttgggaagccctgagattaactgaaattatttccaaaaatctacaaacccatgaaatgtttaaaaaaacaacaaaaaaaaaacactacttaatccctagagcaaaaccaaggacataaaatggtctctgaaaccargttactttatatatttaacaaagtactgggtgggcgtggcataacttgattttaaactggagatttgttttttcaagcaatctggtggttctttagaatactgctttcctagtaccaaatttgtgcaatattaaatgattcctccagtacaatctatcttatttgttcaaatgacaccatcagctatgaaactatctgtgaattttgcctctattctcataggcatcatatcactcrgcactatgttttaaaggaagaaaggtaatactatctgctttctaattgattaatagttacagctgagaacagaccccatacaatctcatccttaaccatgtgtttggggaaagaagaggaaaattaagctgtgagataaagccaaaaatcaagaaaaacttaaaatactgattatgaactgtcattcgtcttctaaaattaaatagtggtatggttgcaaaattctgagtatactaaaagccactgaattgtacacattacaagagtgaatcttatggtatataaatgagtgaattttatggtacgtgaaagatctcagtaagcctgtttttgagatatttaaaaataaaaataactgagttaggaattcacttgtctttatcatctttgtaaactcatcatctcggatgccagtctcatactagctgtgtcaacccaaattgagagaccaagatgggaatctcaatcaaacaaagtttatcaggccgagcttgaggatgtgcgcccaggaagcacaggttccaayaggttataacctgtgtttcaaagcagattacacgaggcacggtattcatacatttttttaaacagggggatacctgcagtacagtgaagcaacaattacactcttgtcgatttgactggtattcagtgatgttacacataaggtaaagtaagtatgtggctgagcgggtaggagagaaggattaataattgtgtaggcatctcagggtctggcggaaggatgattgattccatcctgcctttgttctatatctgatacacaagtttacaaccagtacctgttagtaaaatatttaacaaactccagttacaaatgcacaaagggtcagccttagttaataggccatggttttattacccatatgtccaaactgcagccatcttggctcacttttctcttttcttctgacactatcatcaatcatctatctgtctatctacaatatgttttcttaaggtccctgaaatagaaaaaaaaaatcatttcaagatgtttttcaagatttgaggggttacagttaaaacatgcctatttatgggaggttctaacactgatctaactgacatagctgcctttgcacgtacacattcttcagccagaacaaatatttagaagaggctgtgtcaacccatttttccttgtatttccacattttcccccttttgatcaaaatttctctttagagaacacaaatgatcatacttcatgtccttttgtccttctgcattgggaaggctcattcccaggaagtcatgtcccacgttggagggaaagaggtgagatgaggttgatgtaggcctgaggtggacactccaggggtatgtagtagaatctgctgctacgcttacaggataattctatctacattgtgctaccataatgggcggggagggtgttaattttttttttttatcaagatagggtttcactgcattgcccacrctggtctcaaactcctagcctcaagcagtcttcccaccttggcctcccaagtgctaggattgagtgtgagccactgcacctgacctataattctggttttagcaatagacttacgtaagttggttataaataccatgagtaatttaagtgatagtaagagaagtaggatagagactatatcaaggtttgagatccttttgtcatttgtaagtgtgatgactgggcattcacacgtgtgagatgtgcctccctcaaaccttgttatgacgtcggcactttacccatgaaaaaggggttgaactgcagactggaagaaataggaagccaattaaatagatcattgagaagatcagtagtttgtgcctcttgtaaccatttagcttgcttggaaattctttctgtgcaagtctctacttcacccgaggtgtcgatgtaagtgcaacaggcactgtgagctactgcacagactccttgtcccagctactcgggaggctgaggtaggaggatcacctgagcccagggaggtcaaggctgtagtgagccatgatcacaccaccacactacaacctaggcgaaagagcaagactctccctcaaaaaaaaaaaaaaaaaaagcgcccttcaatttgccagctattttgccagctatttacactatgtgcccatccttgagttggtgggtgtggcccaatgccacataccaaaatgtatctcttaactattcattcataatagtttgaataggtaagttgtttaaaacatgagtgagccatggattggttttactgcaggccttacaaaggcctgcataagcatgatatataacaaatgagacgtgctggcacaatctgctttgctttttctcctttggacattcagttgccagttatgacagtaacggtgggaggccaggaatgtgcagggacctggaaaagatgaggaattaagtttgtgttctagataagttagagaatttgtccctaattggcttactgatagatagacctgggggcggtggggaagggtgagacttagggcttattactaagcacagaatgaaaatatggcctggctttagaagctgaatttgaatttggaaagtgacatttggagggaactgatgtaagtatatggtaacatttggagtgtcagaaaaatcaatctctggtgcaacaagtagcatgtaatgatcttgaatggcccttggaagctggtgacaaatccagcaatctgagagactgcctccatctgccacactttaggagagtttggctaatgaactatttttccatccccagcagagaccctgaaaagtcaagtgtatatacataggtggccatcatgtgtacagaaacattaaccaggttatatatcctataatctgagtcaaagcagacaaggccaatagtccccaaagtaaatataatactctaagaatgtttagacaggagatcatacaggcctggtctgaagtcttaggtcaattagctgtccactcagatgttgtcaacttctcgtcctggtttcagggttgaagctgtttggtgaatcagagacagggatctttggtgggagtcatggtccattcaggaagttgtgcctttttaaggtgagagatatggatccgtgagtctacaacctttaactctgctgtgcatggattagtcaacgatacctggtaagggcccctccaccaaggctggagggagtcctttatgagatgtcttttccaacagacaaaatttccaggttggaggtcatgaccagaatcttcatctcccaggagcgcactgtgggacgtgtcttgcactaaggtctggcttttcatgagctggtgaacaagtcccttacaacagtgcaagatgtccccattcagtaaatttgtatcagtcatcttgattcccatgtgcctgggtcttccagttacaatttcatgagaagagagctgataaagggatggatcaaaggttgagcaataccaaggggagtgccttcagcctagcagaggtgaaaagcctccataaatttagccagttgtgtttttattattccattggtccattctaccaatccggggacttagccaattgtgttattattccattgttccattctaccaatccagaggaactaagggtggtaggcacaatcaaaatacggaaatataggccaatttttttttttttttttttttgagactaagtctcgctctgtcacctaggctggagtgcagtggcatgattttggcttactgcaacctccgcctgccaggtttaagcgattctcctgcctcagcctcctgagtagctgggactacaggcgtgcgccacgatgcccggctaatttttgtattgttagtggagacaggatttcaccatgttagccaggctggtcttaaactcctgacctcaggtgatccgcccgcctcggcctcccaagtgctgggattacaggcatgagccactgcgcccagccccaaattttacaaatgctcaatgacctgggcagtaaaataagttcccctattgctgtgaagttcaaaaggggactccccataatggggtaatcccttaataagattttacccactaccattgcccatcagcaggatgggcaattgcattacccaatgcaaaaacatgcatatcattaccaatacatatttatatgcttaagatggtggcagctagataaaatcaagctgccacatctcaaaaggtctaggtagaaaaagaaaatgatcctgagccccataaaggggttttccaggattgtgttttgggtagatggtacactgtaaatcaatcttctgtgccatgatgacagtctccaataatattgtttataataggatatcattttatctgaattccaatgggtcaagctgtaaatgtgttccatgaggggtatctgataccccactaggataatgggtttatcattaggtccataccatagttcagtttgcgggaaaagtaccccccccttttgtttccaggtagatctttcttcgatgaaagctaagtcttgggtttcctttagcgtagatttaactgtttaagtctcacagtcattccaaggatcggactggtgtctcaaatgcagcactcttagctactgcatcagcaaagtgattaccttgactctgtgttgtgtttaattcagagcagcctggaacctttataattgccaaaagcgagatccaagactagtccatttttttacgggttgccctgagaaggttaaataccctctctctttccatagcattccaaagtcatgagcaccatcagatgcataggggcataatttttgctactttattctttgctagttaacaagtttgagtcagggcaatcagttcagccagttgggctgacttagcctgaagaagaccagcttcaatgaccatggcacatcctgctttaaccttaccaccttctcccctcaagtaagatacatctgtaaaccattctgtcttagcattatctagtggtgattcttgtaggtctgtccttggggtaaaaagttgggtgtgtcatcaggatgaagtaatgagaggtcttatcagaagactggccaggcctggtgcagtggctcatgcctataatcctagcactttgtggtctgctaaattcatatttcagtatttgggaaaagtaagtggggcactgtatatccctgtaacatcacagtccaagtataccgtcattctctccaggtagaggcaaacaaatactaactacctggatgtatagggatgcttaaaaaggcactagagatccacaagtgccactcaaggtgggcagaccgcttgagcccaggagtttgagaccagcctgggcaacatggtaagccctgtctctacaaaaaatataaaaattagccaggtgcagtggtgcaagcctgtagtcccagctactcgggaggctgaggcaggcagattaactgagcccaggaggtcaaggcagcagtgagctgtgaacacaccactgcagtccagcctgggtgacagagcaagaccctgtctaaaaaagagagagagagagagagtggcaaggttaggattactgcaacgagatggtaacattagaggataataaaattaagacctaataggaagttaatctattgaaagacaagtgttgagttatgatgggaattcagaagtagctcaactgaatacggaatgaaggcagtaagggagaggaccccatgactatctctccaacagttttatatagaagggctatagctgatattgccctcatacaagggggccatcctcgagtcattggatctaactgctgactataatagcctataggtctgagtcaacataccaaatgtgttccccccatcttcatgaacagaaagagagaaagttcatagtttgggtgtcttattgctggggcatttattaaccttttaaaaaaaaacaacaacaacagactcttgctctgtcacttaggctggaatgcagtcggctcactgcaacctctgcctcccaagttcaagcgattctcctgcctcagcctcccatgtaactgggactacaggcattttgccaccacatctggctaatttttgtatttttagtagagacacggtttcaccatgttgcccgtgctggtcttgaacgcctagccacaagtatctgcccacctcagcttctcaaagtgctgggattacaggcgtgaaccaccgcgcctggcctactaatctttctttaatttgttgcacagctggctgtccctcacgagtccacatgatgggatcaggctggtcattctttaaacaggtacaaaagggttgagtcacacaataaaaatttagtatccagcttccacaacagcaggccaactccaagaaccctctaagctattttttagtaggaagcatcaaaaaagctaagattcctttgattctatcaggattgatgctcaatcctttggctgacataacatgtgccacatgtttgacttgagaaagacaaaattaaagtttacccttaatgtaatggtcaattgttgaagtaagtacaagttttcttcttcagaggaagaaagtgtgtcagagcaaaggaggaggtatgcatacactggatgagggatgaggatcccctgagagaagtccgagtctgctaaattcatatttcagtatttgggaaaagtaagtggggcgctgtatatccctgtgacatcacagtccaagtataccgtcattctctccaggaaaaggcaaacaaatactgactacctagatgtatagggatgctttaaaaaggcactacagagatccgcaactgaaaaatatcgtcagggacaggcacagtggctcacacctataatcccagcactttgggaggctgaggcgggtggatcacttgaggtcaggagttcgagaccagcctggccaacatcatgaaaccccgtctctactaaaaatacaaaaataagccaggtgtggtggtacacatctgtaatcctagctacctggcaggctgaggcaggagaatcacttgatcccaggaggtggaggctgcagtgagctgagattgtgccactgtactccagcctaggtgacagagtgagattctgtctcaaaaaaaaaaaaaaaaaaaaaaagaacactatcatccttgatatttggtatggcagacaggtgtatgaaggttaagaagcactggatatctaggtattataatactgtctacagcccgtaagttttgtacaaatctccatccccttcccatttggttccttgacaaggaaaatgggggtgttgcagggactgatgcagggaataataaaacctctctcaagataatctcatgattggggcaactccatctatggcttcttgccatagtggctattattttacgttaagcaagggattcttagtgttaatctcaacctttattggagtagctgagagtatctttcctatgcctatgttagactgggaccacagcaggtaagaaatagtttcaagtaaaagcttagcttctggcattagtagaaaagttgaagtttaaaaggagccttatggtttccttccctttattatatttcattttgttttctcattttcccaatcacatgaaggtgtctttacaccactaacatcaacttgtgatttttttttttttttttttgagacggagtctcactctgtcgcccaggctggagtgcaatggtgtgatctcggctcaccgcaacctccgcctcccaggttcaagcaattctcctgcctaagcctccggagtagctgggatcacaggaatgcaccaccacgctcggctaattttgtattttcttagtagagatggggtttttccatgttggtcaggctggtctcaacctcccgagctcaggtgatccacctgcctcagcctaccaaagtgctgggattacaagcgtgagccaccgtgcccggccaacttgtgatatattatgagggcattttttggtttgctttccccaatcccatgatttcagttccagcaacatttcccactttaaggaaaaagagatgagcattatggatgtcgtggaaatttcaatccagaaggttaaacaggtacttctgggcatatcaggaaaacatgggattggctaagggtatcacattcacagcccttgggaggaagccaaacccaatgaaccactaaagcaaagatgtgaacttaaagcaagggatgggtttattaggtatacccaccatgttaactttttcattcctctgagaaatggggttttcaagtaaggtggaatttataactgatacaggagctcctgtgcctactattgtgttaatttctcccaaagagtgagttaaagcagcatattgggagaaatgaaaaccccctatttcctcagaggagtcctagttttccagtttatcatcctgtttccatttcaatgtcctgcaattccttttaaaatgcctagtttcttgtagtagtgacagacaaggggagaagagttcttaggaccaagacttcctagcctgggagttttaagaggttaagtgttaccattgttaagtgtacagccttttgattttcctttttcatcattgtgcaggacaactggtcagccagttgaccagtcattagttctggccatcacctagtcagtcatgtgacatttgacaagagtgggtagtgcatcacccaaattgtttgggaaattttaataatatgtcatttttattgttttcaaagttgtccattgacatctgcaatattgttttcatgttttatcaaagtgggtaaaaaaatctacaacaggcccatctggattctggcagcatcgctggattttaatctaatctacgatctttttttttttttttttcctgagagagtctcactctgtcgccaggctggagtgcagtggtacaatctcmgctcattgcaacctccgcctctgaggttcaagcaattctcctgcctcagcctcctgaggaactaagattacaggtgtgtgccaccacgactggctgatttttgtatttttagtagagatggggtttcaccagttggccaggctggcctcgaactcctgacctcatgatccacccgccttggcctcccaaagtgtccggccgtaatctatgatcttttgaaaaaaacaagggaatggcatttaacagagaagctgctcatacccacgcgtctttgagccatcttctgaaagctggggagttggctgtggcagaggtcatactggattttcaggaacaagatctgttaggggatccaaccacactgtgctttttctagctattccttagcttaagcagctgaaaccagcatgtagacaagccgataaatgtcagaatgacctgggtcatagattttaattgkgagttcaaattctttggtaaagcaaatccgatcttcataagggtcaggaaattccttaactatggcccataatttggccttcgactagggttgatagagaatcaggactccaggcaggccgggcacacacgctgctggtactggaagtgaaccactgggaccgagcatgagcaagccagtgagtgggtcccgcagccccctggacccagggccaagcatggcggctgccaaggtggctttaactgagagagcagatccaactgagcttataacaatatttttgaagtatgcaagcattgagaaaaatggtgaatttttcatgtctcccartgactttatcactccatacttgaacatttctggagaaagccagcctaacccaaagactgtggaacttttaagtggggtggtgggtcagaccaaagatgggaggaatgttgtcccagcgttgatgatgctaagtttgatcacttgatgaaggtggcatccaccagctatttccattttaatgactagtatcttttcaagaatgtgtggccttttgattggtcctgggtgcccctgatactttgtttatggtagcctttcagctagctgtttgacaaagctggcaaaggagaagtaacttttgatcagaaagaggatggtaccagcagtctacaggtgtcatcccagtcactgttccctggtcccaatggtaacaactgacatttatcaccatcaattggtttttcctgtttttaaacttaattggaactatacagaatgtactctttcagtctggcttcttttgttcaacatttgtgagatttatccatgctgtattttttatttttcttcactgtatagaattccgttgtgtgacagcatatccattctagggtcgatagacattttgggacattttcagttttggctactacaagtaatgtgttttcaacattgttttacgtattttgtgtgtgtgtgtgtgtgagtgtgtgtatttctaggaatagaactgctgggtcatagaaaatgtgtaaatttaccttcagtagatcttgctaaactgtttcctaaaatgatggtaccagttaacactcataccatcattgtatgaaggctccatttatttcagatatttgccaacacttggtatcagtcatttgttatttcagtggtatctcagtgtggttttgataagcatttccctgattccaaatgggtcctagaacttattggccatttaggtatcctcttcagtcatgtgcttatcttctggatacaagacctgtggtggttatatgtttcatagatgtctttactctgttcactgttactcatttaactgagtcttgaggaacttaagttcctaattttaatgtagtacaaattatcagcattttcttttgtagctagctctttttgcgtcctgattaagaaatctttgctttcctccaggtcgggaaaataatctccattattatcttccagaagtttgttttcctttcaaatttagattttaattgttctagaatttgtgatatttttacatggcattaaaggtaagggtcaaagattcttccctggccctcttccccatggatatgtagatcacccagcaccatttaatgaaaagatcactcttttctttttttttgagasgcagttttgctctcgttgcccaggctggagtgcaatggcacgatctcggctcactgcaacctccacctcctgggttcaggcgattctcctgcctcagcctcccaagtagctgagattacaggtacccgccaccacgcccagctattttttttttgtatttttagtagagacggtttcaccatattggccaggctggtctcgaactcctgacctcaggtgatccacctgcctcggcctcccgaagtgctgggattacaggtgtgagccaccccatgcagccaagatcactcttttctttattgcactgcagtggtactgctgtcataaattcaatatggggctgtatctgaatgctctattcttttcatataattgtatattatccactaatactatcttaattactacagctttataagtcatacctgataagtctttcaactttattctttaagattatcttggctattcttggccctattcattatcaaaacaatttcagaataagttgttaatttccacaaacatcctgctgggattctgaatgcactgaatatgtgtaatatctgkgtgtatatgtgtaattaaatgtttttttgtttgtttgtttgttttttctgagacggagtttcgctcttgttgcccaggctggagtgcaatggcacgatctcggctcactgcaacctccacctcctgggttcaagcgattctcctgcctcagcctcccaagtagctgggattacaggtgcccaccacctcgcccggctaattttttgtatttttagtagagatggggtttcaccataatgaccaggctaggctggtctcgaactcctgacctcagatgatccaccctcctcagcctcccaaagtgctgggattacaggcgtgagccaccacgcccggccaattaaatgttttaatcccttaaaaaaaagagaaagagaattaggaatcccccacctatcataggctgttcccagaatgaggcaaccacaggaagcattcctgtggagttcctgtccgtcacttctgaacaagaggttgctgccagggtaggtggaaggacaacaagagcaggggcctttggagccgtgtttcctgtcacagtctaacaagtggcagacaaggagaaagagatggcagaagaagaaaaatcagatccagcctggagagttagaaagatgaagatagagtggcagggcacagtggctcacgcctgtaatcccagcagtttaggaggcgaggcgggcggatcacgaggtcacaagattgagaccatcctgcctaacacggtgaaaccctgtctctactaaaaatacaaaaaaaaatagccgggcgtggtggcgggcgcctgtaatcccagccactctgaaggctgaggcagaagaatggcgcgaacccgggaggcggagtttgcagtgagccgagatcgcgccattgcactccagcctgggcaacagagcgagactccgtctcaaaaaaaaaagaaagatgaagatagagtgaaggtgtaggtggtgaaggaggcccaaagagaggtacttctgaagattttttttttttaataggagagtatatttgagagctatctgttaacacctctaagttgtttatcagcattctataaggaagaaagatcatcctacccacttttgctactttcaagataccactggaagtagtttccccattctggttgcttaatttttgcactagcaccttccatcctggtctgcatatatcaaaggatctgcatttaggccattgtgatgtggagtcattcttcagtcatcctggtccatttgtttaagtaattacacaatgaggcaccccaagtactgtatattaacccagctggggtttctaaaggtggaatcagatgttctgcagttgcaggggatttagtcgatttagaggatttgttctccataatttttaataccttctcattagattgactaagtcaggaggtgttctgaatctgaatgtgctgcttgcaaacacaaagcttgaggatgcgcacccaggaagcacaagttccagtagcttattacctgtgctctgaagtagactgcatgaggcacagtctttatatattttttaaacaggaaaatatgtgcggtatggtgaagcaatagttgagaatttggttcatattcagtgatgttatgcctaaagtcaagtaaatatgtggttgagtgggtagaagagaaaagttaataattgtgtaggcaccttagggtctggtggaaggatgattgattccatcctgcctttgttctgtatctgataaacaagtttacaaccagtatctgtcagtaaaatatttaacaaactccagttacaaacccaaggggtcagctttagtttgtaggcagtggtttaattatgcatatgtccaaactgcagccatcttggaccagttttatcttttcttctgacaccatctatcatcatctatctgtctacagtatgctgtctgaagtttcttcaaataggacaaacattttgagaagttcctcaggatttgaaaggttacagttaaaacatgcctatttatgggagtttgtaacgcttatctctgacatagctgtttttgcaatatacacacattcctgggccagaaagaaatttagaggaggactgtgttgatcagttttttcttttatttgctttcacaggtgtaataaatgtgttgcttaaattttaagttgtcatttgtatagcactttacattttataaagcactttcactggcattctttctttgactactattagccaaaaacccaaaaattgttttaatactgtaacagttaaaaacaatcaaccatggccgggcgtggtggctcaagcctataatcccagcactttgggatgccaaggtgggtggatcacctgaggtcaggagtttgagaccagcctgaccaacatgacgcaaccctgtctctactaaatataaaaaaatttgccaggcgtagtagtggcagacgcctgtaaatctcagctactcaggaggctgaggcagcagaattgcttgaacccgggaggcagagtatgcagtgagccgagattgtgccactgcactccagccttggggacaagagcaaaaattcatctcaaaaataaaaaataaaaaaaaaaccatgccataattatagctctgaccaaataaactgaatatcccaaagttaaaaaagattaaaggtaatagctaagtcagcaaaagcaatttaaaaagataactaattatatggacaatatatataaacaaaaaaataaagttttaaaacacaacaatcaattctaaacatctgttttggctgatttgtagggttttcttctactttaaagctgtgggtttcatataaatttaatgatcttaatgaatctaacttaatgaatctaaccttggtgctgatgagtcaagaaagggatgagataaccacaatatatcaaagacacaaaagggacaattctaatcccatctaatgaaattgggaagccaaagatcaagaataacgtctaattttacatctaattaaacacataagtttactgaatataataatatacataggaaagaaaaagagtttcacagcgatagtttatattaaagacgctatttaagaaaagttttctgataaataagattaaagattatctcttataaatctcagcaatactaaatacttgttcattttaagctccaaccaggaaacagaatgaaaaatactgaaatgcaaattttagagctttagtaccctttttaatatggaataggagacagagaaaaggtgatgaatttaattcaactattttcttgtctttttaaatctttataagggtgttaactcacatttaaggatatggagagggttcttattacgatgaatttaacatatgttaagttcaccttagttggcatgcatgctttraaggacatcattatttactctaacttccccaattccactttctagattccttcttctggcttttttatatattcagaagtaaagcgttttttaatattcaaaagtacctttcaaaactcagtaataccactgggtggactagatggaagaaaattgagagcaatagtcaaacgtggtaaataacagttaacttcacaactgtccaagtcatcttgggaactgaaattctgatatgcacaaattaggggaacaacctcccaaatgaaactatccttaagtttccaataaaccaaaaccctagcttctaattatcatttttttctttctaaaaatcaactggcctaagtctttaaaaacaaaaaaaaaacacaagatagttgaagtgacttaaatgtcaacgaattttcagactggttaaattatggttgaaacaccacagcacgctgtttcaacctttaaagcaagttgaacagtagtaatacagtataatctcacaggatgtttttaaaatgagactgtaactacacaaacttctttttaaattggttcttaaaaatagtaaatagtggttgcctctgaggagtacaagcataaaagaagcttactttcactttactacctcctgcttttttttttttaaccaagagcatcactctccaataaccttggttatcaagacacaccttaagagtaatctaaaaaagcacagagagcttaaataaacttcctcaaagacatacagatggagagatacaaattagaaaatacactccatgggagagactacgaaatagactggtaagatctaaatacacacagagcagaatgggaaggaaactgcagacaggagacaagcgaaagatttgtaaagtgggaaggaagcagcagtgaacaaagacaaaaagaactaagcaaccaaagacaactttgaagtgaaggagatgcatttctttagagccaaactagaaatcatgatgatgggaaaggaaaagaaataacacgaaaaaatactcgcgatcacaaactgtggggatacttgagttcctgtaattggtaatgccaccactgacaccattttagtcaatcatatgctatcattaatcacatttaagtacagcatccagtaaacactaacagtgtaactggagcaacacttttcacaaacggtcaacaggactaaatgctttgtattctcccgcggctaggctatttggctgcagtattccccaataatgagacatgtttcatctgcagttaaggaaacccatggagcagtaagacattatttcctcttacctgcttctagatagcagcctacatctcagcaaaattcctgaatttagctaactttaagggataaatgtaaatctgtctagaataaaactgagaaaggggtagcagaccccacttgtttgccaacagcctcttcaaacatgtgccctgtctctgagaaattatatggtaaagcatttataactgtggctgtctatggaatccacacttggcagaagagcctaaaactcatcctatataggaaagaggtcaaactcagaaataaacaagtcttcaactgaaatggcataggttaaaaataaaattacaaattcaagtctctgggctttagatagtgtaaaacaccaggcccctccaattttggtagagcgaaaaaaaaaaaaagagaaacaaaactaggtctcccaattctagattaagaggaattccagtacatgaaaaaaaaaactgaaagtgtcagaaagaatatttatttgcttttaatggatgattatgagttagaaaatataaccatacttgggtctgcaatgagtcaatttggagtatatttctgcttctgtctttacaactaaataggaagtcactcctaattttatttgcccttctgtaacattgggaaattctgtttatttccttgaatttataagagttgcacattacagaaaaataaatgctatctatcccaagatatatacaacaaatttaactgaaggtaaaattctgattactaaagattttcttttaagcccaggtctgtgggaaaagaggaacttagccttttcagggagactttaaggtcatgaaaagccccatatactcctctatgaagctgttctcccattttcaaacttgagaaaaatgttaagaaaatggatacatgatagtatacacacctgatttgacccaaacctcaggaaagttccttaacctcactaatcctgtttcctcatctataaaataatgacaggccgggcacagtggctcacgcctgtaatcccagcactatgggaggcagaggcaggtggatcacctggtcaggagttcgagaccagtctggctaacatggtgaaacaccgtttctactaaaaatacaaaaaattagcccagcctggtggcgtgcgcctgtaatcccagctactcaggaggctgaggcaggagaattgcctgaacccagaggcagaggttgcagtgagccaagatcgcaccactgaactccagtttaggcaacaagagcaaagctcagtctcaaaataataatgacaaatccaaatctcctgaatagtatctgtaaagcatcaacacaacatcaacacaaagatcggcacaaggtatgcactcagctctgacaattctttttactcaccaatctttcttctttctctctttttttcctcttacatttcaggtatcattttgctttctgtctttgggcaatccactcgcaggaagttactaaccaaccttattggtaatacctattattcattccctggtccaatctctccccttagctctaggataaatatggccaactgaccaccaatccattccaatctttaaataccctgagaattgattatataatcttccctccaaatctgctcttcctctatttacctatcttggttgtcatccacagtcacacaaaaacaacttggaagccaactgagctcttccttcaccctctgcatggccctccatcaaatttattgtgaagtccttagaaattctgtttcttccttcacttccatccccactgcctgtttgttcctcatcatggtgcatgaactcctgtcagaaccttgtaactgacttccctacatcctttaaacatgtgatatcttcctaaagttcaactactaatcttcccttccaaggtaccaacactggcttcatgatagtatctaaactccttggcaaggaattcaaagcttttcaggatctgctcctgcctaccagctgctcccaacttggaattctgatattctaggagtgtcaaacaaactttaataactagccaccctctactcaggctgttatttctgcctgagacggcttaccctctatccccttgacctgggaaattctcttaagaattacttattttacaaaacccttccatacctttattagaacacctaccacataagatttcacttcttgtttactgcattatctcctctactcaatagtaaaccgctgtagagcagaaactaagtcttgtattacaaccaggtgctggctgtacatagtacacagaaacgggtagaatttgctaactactcaaagagtggggcagccaagattaatataaacagtatatttaagggcatggaatgggaaatggtgtctacaataaagacgtgaattttaaaaactaatgttttgaaaggagtcattgtttgcactattgatcatagaaatatttttaatgtttttaaaaaggagtctttttttaacatttggtctatagacttttgcaggaaaaaaaacctgaggttttaaaagctataggaaaaaatgtttcttgcttatttcaagcaggagcagggggaaggaaattagactagtgtggggagaaatgagaaatgagagctacttcaactcagcacagttaacatttaccaaattaaaataacagtaagccaaaccaaacttataataggtggaaaacaactaaatacaaagctagaaataaattcttttagttcaactgtaactttcatacttgaatatgtaacagcggtgtacctgtgacattagtatttctgaggcaaagagaaaacctccctaccttgaaaacaaactccctttttggactagatgacatttccagattatttccataatacagaaaaatcctagttgcagattcaataaaaaactggagaaacaaaagacaacaaaaaagtctcaatttataacaccccaaaatcaaaacttaagtgtgggaaatacaagacaatcttgtggacaagagaaatcaggaagaaagaaaaatgacattttccaggtttccgcaggactttctgatgtaaaatggttgaatcagaattgaaaagacaaccaagagtcaagggcagtgtcttcccagaactgctttcttaaggtaagggaggggaccaaagacactcattctttccactaaaaatttacttaatgtttccccagaaacgataactgacacaggcctcagttttatcttctgtaaaatgtctacttcccagtgttgtgaggacaacacagctaatatttatcaatcatgtcactggcttaattacaacttatttaaaataggtattactaccattttacagatgaaaaaaactggatcacaaagtgactataagatgatgacagctttgaaacccaagcattactaacccagaaacctctgaacagcaaaacttcgtgcctcaatacatgtgttccttttctgctcaaccaattatattcctaccatctcttaagaaaaaacgaaaatgacatacttttaaagcaacctactatgtgcctggcatggtaaattgattaatttatcctcataagagccctgtatagttggtttagatttaaaagtttatgctttccccagtgaaaaacttttattttacatgtaaaatggttcttaaattgcttctctgacataaatatgtctgagtttgagccctatgagtcaggatttcccaggacttgataaccactctgggggaaaaaaaaaaaaattgaccattcaggttccagatatacagaattaagaatactgtgcaaggacagacagacttggggcctgctgtccaccagtgatctagaatattctaccaattgaacttcgtatctccaacctcccacaaaagcaatacaaagagaaggcagtagagaccttgtctgtgggtctttcccaccctgaattcattcacattgataatccaaatctctgttttacatcatctaattagtaaaacaaaaaccattaagctctgtatgtagtatatgaaatctgctaggaaatggaaattctagccataacttagctatgaaatactaattaagaaaaacaactcaaacaatctcagcgtatttgcaaagcacctcatatgcattttaaatacaggacccagagaaatagctgcgaaaggaaagccaaagttattaaatccaaagtttttcattttcttgacatgctctttctatttaatacagaaatgtactaatataggttgccttttggtattgtaatttggtcaaccaaaacttgggaaaaataggtccaaagtttttcattttcctracatgctctttctatttactacagaaatgtactaatataggttgccttttggtattgtaatttggtcaaccaaaacttgggaaaaataggtttattaataacaaaataatgaaaaaaaatggatttcaactagtatcgatttttaggtgtgtgggggcaggggcattcaagggtattatttcctagtaatgatcacttagattctaggccttacacatgattcaaatgcaggagaaatcaggaaagaagcaacagatatggtggtgggtatcggatgtctagactacaggcaaaccccaaataccaaagaagcatccatgtgtcaaaccagcataatttttgagctatgcctggggccacatacaaaaaaagaaaaggttagcttgaaaagaaaaatctaggagaggtaaccagaaggtcaaccacagttcacgggatctgggaagaagctagccgttaccctgtgtcatcttcctgagcagcttcctccccagccagctccccagcctccttacaatgtttccaaaaggcccaactccctaaacatttgcttcttcaaggtcatcctaaggcactgaataaccaccaaacactgagtcacgcatacctttcgcctaaaaaagatcccccttcccaaaatcattatataaatactttaaatgccatgagggttttctccgaaactccaccagaaacaaactcccagacttttagattgggcaactaaatgtgttcaattttgcgacataaaattttaaaaggcttttcaagtctggcaaattccagttcaaaaacaggtgctttcagcgtactctgaataacaaggtcaaattcatttttaaattattaaaagaaaaagaaaagcttttcttaaccctccttaggacaacttaagaagggggagaaagaattgctggggtaaaactgtctcggatagggtccctgtttaactcaagagtaaatcctaatcttccgagtgcctgaagtaatggaaggttacaggaagaaaataaaaacaaagaaactgactagggtcatagttaccagaacaaactgcaccgccctaccacctcaagaaaccaactccccctacaccaaaacaaaccttgcccttccccgctccccccaccccctagaaacacacaaagaaactggccgcacgcacaattcgcccacagtcctcacttcccttagtagggcaacagggagccccggaacttccccacggtggtttatcgggcgtcgtcggggctgggtcccctggacttgcgggccacagctcggctggggaggaggtgctcgccgccctcacccgtttctctgaaagcagtaaaatgcctccccgctcctcccagggccctcgggtccccaccttccgtaaatcgtgcttccccctcgggcactccggtgactgccgagagagacgccgagccagcaagtaagaatgctccctggtggatttgttggtaaataagacatctcgcgtcgggaggaaagttcctgcgggggccgctcgccggggcgagggcgagggcagcgggaggtgaaccgcgtcgctcgccgccacctccctcacctgcgccggaacaacgggccccgcgccagcccggcccggcgcctcccgcaggccgcgcctcccgcacgccgcgctgccggggcttgttcctcctcatggctttgccctgacgtaattcaaacatggcaacagttcgacttcaaaggcgaacccacagacctcccagacacaggctcccgggccacgagaaaccggccgagcagtccgggccaagctccccggaaccctcggccgtcgcaacccccgacgccagggctgaagcgccgggcactgccgcctccctcggtcgcccgcccgcacgcccggagcggggaagcacgccgcctccctacgcaccagcatggcacctcgcacaagtagcgccgccaaagtttccccacgagggggctgagggacaaaagcccctcccgaaactcgcccgaacttcgagggcctccgacctgcacggccctacgcccaggcggcggccccgagcgccgggggcccgcacgggcacatgcagccctttgttttctgtccagccgggcgctgcctacgtgcagcatcagggatgtcggagcgtttcgcaggggccggacactggacgatcaccctgggtaggggtccggaccccgcgccccgaagagtccggagcctggccccccgaccctcccctcgggagcaggcccatttaatcaaagttttgcagtgtccttgatgagaaacgcccggagtatccgccccgcacgggcggagagttggcgactttcactctgctttttaaactggcaagacgccatcatcagcaaaccacattgtcctgccggccggacctgcccgacggcggccgcatcccacggctcacgcggggctggacattcggacaaggaccagggtcgcagcccgaagcacgtggtctgtcacgtagagcacaaaaagcagtgccctgcrgagttcactgactcccgcggcgtasacaacgccgccgcctccatctccagccaagttggcttccctggccatcttacagcgcggacggccgcccataaacgggaagccctcgcggtgtcgcccacacctacgctacaggtgaacgcaccgggagcaaaacttcgggctccgaaagcaccccggacaccagaggctcttgggcgcggtccgaagagggcaggcgagtggaagacgggctgtttttaagcgaccgcgtgttgctctcattgtcgcatccgcatccctccggagttgagcaaacaacgccacgccgcgtgcgctccggcagagcccagcactgacccccaaaggccgatttaaagaccctcggccgccagctcggaagcggatggcaacttagtttccgagcgaatggcgtttattgtccaccctagtccgagggctgcagtcaactaaaccacgaggtttcacaacggcgcccgaccctgcccgcgcctcgcgcccacgcggacgcaccgaccccggccgctgcgcggtggccaacgagtcgctttcctctcgggcctttcggccgccgggctcctttccgcgagagaacactgcggcggagaaaagtcattgtcaccttcaacgtggatccctcaactccggcgactcctcaattatgcccaggctccactcacttccccgccccgagactttcggtttgcctcaaataccctccccaattaataaatacacactaaacacgagcgtaccaaagaacctggggtctgaagatcacgaaaacagcgctcccaacaatgccacctccaagacaaaacttcctgtgtgtatgtggaaggacggggggaggtgggtggaggtgaaaagagaaaaaaaaaaacactgaaatcaaagcctcgtgagacagttttgcactagaagcatggtgagagtcactcaccttccaaaagcagccgttccacgcgcaataatgtccccgaggtgcggagtgcacgccaggccagtccccctcaagcgctccctcctcctcaactgccttgtctagaaagatagtctcctgcagttctgcagttgctaccgctggccgggaaggtgtagattccgctttccctctgcgcacgcgcggctcccggcrcaaaattctcttgaatcgaacttatttgcatacgggcgcgcgcacgttgcgggctgggagggggagaagtcccggcgaccgcgcgcgctcccgaggcctctattgtccttttaaggggagaagctccgcggcgcgggaaacgcggcggccagagggaaacgggggcggggactgcttactacggcggacgtcacataaacaaacgcccccccccccggctgcaggccgcggcggagagggagaggcgaggtgggaaagggaaaggttagcaactgaggggagggctgcgctgcttggcgtgttttccgcccccgaagttgttaggggcaccattgagcgctgaaaaattgttctgaaagctgcttttgcaaaattctcacacctgtccccactgtcggtgacagaggaggtggtcttgtaagcacccagactgaatttatactaatcccacgtttcctaaattttgtttgaagttaggtttttgaagcttgtaaaaaaaaaatcctctggggccagcaaaggtttagtttttgtgcagttgtaatgagtcgtttaataaagtcccattttaacaccctagccattcgctaactcccgcttgcccttctcaaatagtaacccaacccataacaatccagttttttcctccacttcggccttaagatttcaagtctctccgaattgaatgattgttaatttccgtgggaacagtgccgctttctttaaaagactaggcattggaaagccaataacctagggacaggcatacctcctctagcagcttgtaaagggtgttccactcacccagaaataattccagtaactggtggtcttgggaatggaaaaaataacgagtgacgtacagacttttcaatgcagaatatgtaataattcaacaatctaagcgctttctagactccggaagaaaaaaactgaagtaactcttctcagattgataagaggaaaatgaaaaccgaatgattgattcgcctttgtcccaaggacacacttaacaccaacaggcagaaacccggggttaatgatagagggtggggagagaggaaggatgtttttcccagaaacttgatattggtcccaagttacaaaagtgtgaaaatcaaccataaaacttaatcatctgctgacacgtttcgctgctttcactgcagtgtcaacaatacagatttaaatagttacttctgaaatgttaatttaattcaacaggcaattcctagtacatacagtataaacccacttctgaactcctcaactaatacttctttatttttctttaggttctgtaacatactattcctgtaactgtatatgaaaactatattataaatacctgaaaagatagcctggcgtggtggtgggcacctgtaatcccagctattcgggagcctgaggcaggagaatcgcttgaacctgggaggcggaggttgcagtgagcagagattgcgccactgcaccccagcctgggcgacagagcaagactgtctcaaaacaaaaacaaaaacaaaaacaaaaaacagaaagaaaaaggacacctctcattaaaatatgagctccttaaagacaaggattttatgcctttcttacccatctttgtattccagtgcctgacacagtgcacatcagataatatatactgacatcttgcatgcattagttggctaggaaaatttttttttaatgtaataaacggctgggcacagcgcctcacacctgtaatcctagcactttgggaggccaaggcaggcagatcacatgaggtcaggagttcgagaccagcctggccaacatggtgaaaacctgcctctgctaaaaatataaaaattagccgggcatggtggctcacccctgtaatcccagcactttgggaagccaaggcaagtggatcacctgaggtcaggagttcaagaccagcctggccaacatagtgaaaccctgtctctactaaaaatacaaaaattagtggggcatggtggcactcacctgtaatccctgcaactcgagaggctgagatgtggtggcacatgcctgtaatcctagctactcaggaggctgaggcaggagaattgcctgaacccgagaggcggaggttgcagtgagccaagatcacgccactgcactccagcctggacaatagagcaagactctgtctcaaaaaaaaaaaaawwatatatatatatatatataataaatatataaattagctgggcattttcgcacagacctgtaattccagctacttgggaggctaaggcacaagaatcacttcaatctgggaggctgaggttgcagtgagccgaaatcgcactactgcactccagcctgggtgacggagtgaaactcttgtctcaaaaaataataataatggccaggcgaagtgcctcacgcctgtaatcacagcactttgggaggccaatgtgggtgaattacctgaggtagggagtttgagagcagcctgaccaacatggagaaaccccgtctctaccaaaaatgcaaaattagccgggcgtggtggcacatgcctataatcctagctacttgggaggctgaggcaggagaatcccttgaatcyaggagacagaggttgtggtgagccgagagatcaagccattgcactccagcctgggcaacaagagctaaactctgtctcaaaataataataataataataaatatataaatataattttaaaaaattaatggacattttcaaggttcttacaggtttatcgctaatcagaactttagtttacaatttttgcatttgacctaaaatgagtttggaagttatagtggtcacattggttgatatgccagccctgtccttatgacaataaaaatgaataagcttaatagctgtttctgtgttccactggtggcaaattggaccctaatcataaatttctgccttctttctaaagagaattttaacaattgtcctgggttgtctcaaatatttatttggcttatgacagatcttccaaaaataatttcaaattattatatgcctctgaaggtatgaaaactgcaaatactggccaggcgcggtggcttatgcctgtaatcccagcactttgggaggatgaagcgggtggatcacaaggtcaggagtttgagaccagtctggacagcatggtgaaaccccgtctctactaaaaatacaaaaaattagccgggcatggtggtgcacgcctgtagtcctagctacttgggaggctgaggcaggagaatcgattgaacccaggaggcagaggttgcagtgagctgaaatcacaccactgcactccaacctgggtgacagagcgagactccatctcaaaaaaaaaagaaaagaaaagaaagaaaattgtaaataccataataatattttttaaactccaattatggtttacaggagtatatatatacatatatgtaagtgtgtacacacacacacacgtaccttgaatgctttttctcttgaaagtttatgtaaagaatatttattgtggccggacgcggtggctcctgcctgtaatcccagcattttgggaggtcgaggtgggtggatcacaaggtcaggagtttgagaccagcctggccaatatggtgaaacctcgtctctactaaaaatacaaaaaaattasccgggcatggtggcacgtgcctgtaatcccagctacttgggaggctgaggcaggagaattgcttgaatccgggaggcagaggttgcagtgagccgagatcacgccactgcactccagcctgggtaacagggcaagattccatctcaaaaaaaaaaaaaattttattgtaatacagggatggaataataaacgcaaatgtgcaagcaatgcaggaattacagtacttaggatacaccgttcaggtaaaaaagtacctagaagttgcagagctactgagttaatgtagccagacttcctctgctctcaaagtataggtcaagaagtaatctgggtaagttttttaggaagggtagctacaaaattcttttttaaaattttttattactttttaatttttctttgataatcctattgcaataaacaaaattctcaaagaaaaatcggaattccatagtctttttttttaaagcaaccacctgctatttttgaacaaccaagtgcattccgaaggttcttttgtccagtttgttgcttgaacatgtcattatggatggccctacccaggcccaatagctcatgtatgggttacttttaactactactacctaaattgcccaagtgaatttttcaacgtgaaaaaggaaagaaggaaatacaagaagtaatttataatatatcaatttgtattacaagagattgaattacatcatgctaggaaaatatctgcggattttgttttgttttgtttttgtttgttttttttgagaaggagttttgctcttgttgcccaggctagagtgcaatggcacgatcttggctcaccacaacctccacctcccgggttcaagcgattctcctgcctcagccttccgagtagctgggattacaggcatgagcctgcatgccyggctaattttgtatttttagtagagatggggtttctccatagttggtyaggctggtctcaaactcccgacytcaggtaattcacccaccttggcctcccaaagtgctrggattacaggcgtgagccaccacaccctgccctgagtattttttaatgactacaatgctatgttgaactcataagtagttttcaaacattttgaagttgaaagctaactactttcttataatgtatgtctcgctgtagaattatccctaacgcttgaatttttattcctttagcaaacatttaatgatcatcactatgtgccagatagtgaaatcatttcagaacttgaggggctcaagcctctctaattcatttctatataattctattttatttgctcctttttcttccgtagaatgtgttgccttcttttgagatttattgtcagccactttagaattyaatattcttggaatggaggataaattatatataaaggattgtagaagaggacaaatcttgcttgattatgaaggacattgctagcaatttagtcatgtttgtaatgacaaactaatgattgtttttaaaataaaggcagataccctcatcagcggctggtaccaaccacatgaaaacatgtttgccaaacccaggaaagagctgatgattattattaagcatagggtttggttcctctttttctcacaacaaaacaagtacagtgttttaataatttgtttaaatctctttgaagttcaaatagcaagccgtcagagcaaggcagataagtttacactcgaaggtatagcctggattatgccatctaagttaccccaatcctccaacaagtgtcgacagctgccagaaaaagttatttattacttaatcaaaattaacttttcaaatttctggacataamagcttaaagaattatcaaaaacttattcttagagtatcctgaacttatagaaatcttgttttataatagtatcttatgacatttgaacagcatgattttatttatttatttatatttatatatttatttatttttgagacagagttttgctcttgttgcccaggctggagtgcaatggcatgatcttggctcactgtaagctctgcctcccaggtccaagcgattctcctgcctcagcctcycgagtagctgggactacaggcgcgcacccctaatttttgcgccctgctaatttttgtgtttttaatagagacagggtttcaccgtgttggccaggctggtctcaaactcctgacctctggtgattcgcccgcctcggcctcccaaagtgctgggattacaggcatgagccactgcacccggccagcatgcttttaaaaaataaaattaccagtaacaaaaataatttttcgttaagaagaatattgaaaaactagaatgagttcacagtagggtaaatcaggacaatgaggaaggatggaaaccatagcataaaagcaataatagaaggaaggctgtgtttcgattgagtaagagggcaatctttgactatctgaaggattgtccttagtagagggatggacttgttttatcctttggaacaaaattagtcttgaaaatcaaaagaatgatgctaaacatgataaaatttcccagacatacaaatagtccaaggatggttcaggatacttccaaaggcagctcctcatcactaaacaaacagataaaatcaagataatgcttttaaaaattcattcaatgaattgcattacttacaatatgaagctagctaacctctctgaactcctgttgaattttatgaatctttgattgcacggaatagactagtgataccatcaataatgtctcaaggtcatgaggtgtttacatcactgtggccacagaataaagtgtgagaaataaaagaaaaaaaaagtaagtaccagggacttaaccatgtatggcaaggggatcagatctaatctggaggtaagagaaggcttctttgaggaagtgacattgagatattagtaggattcgatggagaagtgggagagagggaaagagtgttgaaccagtggcaacttcaggaacaacgggtgttagaaaaagacaagactaagagaaaaaaatgtgtctttgactaaataaaagtcagaataaaagattgcaaatgagtcctgtttgagggaaaagatggtatcaggtgttggagacagagatttaagccctgtgaatttggaagttacatcggagttggacgtaattgcatgccaaaagcatacctcagagatgaacccctataattaggttacaaatggtttaatcaatgtatgtttcttctaccaaaatttagttttctaaatgtcaataagaagttgatccccaccgctatccccaggccaggtgcaatgtctcaggcttgtaatctcaacactttgggaggccaaggaagagaatcgcttgagaccaggggtttgaggttgcagtgacctatgatagcaccaccacacttcagcctgggtgacagagcaagactctgtttcaaaaaaaaaaaaaaaaaagaaaaaaaaaagaagaagaagaagtggaagaagaagaaggagaaggagaagaagaagaaagaaaaaaagaagctgatcccccagacatagagttcacttcctggaaaacccactgttctaactattcaaggcatcactaaaggcaagcatgctacatcatcaacagatgatgaacaagtgaatgagtggacacataatagtcaaagagacatgctgcattgccatttctaaaagctttggtgataaaatattgaggaatctggaagaacttacttattgatttaattttttttagtgacaacatctcaccctgtcacccaggctggactgcagtggcacaatcatagctcactgcagcctctaattcctcggctcaagtggtccttctgacttagcctccagaatagctgggactaaaggcatgcaccaccacacccagctaattattattatatttttttgtagagatgggatcttgctatgttgcccaggctggtttccaactcctggcctcaagcaaccctcccacctcagcctcccaaagtcttcggattacaagtgtgagccaccatgcctggccaggagaacttaatatattgctgacagttaatttaaaaactttcagccaggcatggtggctcacacytgtaatcccagcactttgggaggccaaggcaggcagatcactagagttcaggtgttcaagaccagcctgggcaacatgacaaaatgccatctctacaaaaaatccaaaaattatctgggtgtggtggcacatgcctgtagtcccagctactcaggaggctgaggtgagaggatggtttgagcccacgagtgcaaggccagcttgggcaacatggcgacaccctgtctcaaaaattaaatatttatatcaaataatgtttttagcatggagtgagggaactcaaaggacttgaaagattaataaatttaactacataaaaatataaaatttgtaaaataggagaaaataccatataaagaccaaaaagtcaaactattaaaaaaaaaaaacaaaaacactgcaagataaggggataatttctttgttgttgttgttgtttgagacagagtcttgctctgtcgcccaggctggagtacagtggtgtgacctcggctcactgcagcctctgcctcccagcctcaagtgacccttccacctcagcctctggagtagctgggactacaggtgtgtcccaccatgccaggctaatttttgtatattttgtagaaacaggttttcccatgctgactaggctggtcctgaaatcctggggctcaagcaatcctcctgcctcggcctcccaaatgctgggattacagttgtgagccaccacaccagacccaatactttcttaatatcagtaaagtagaagtgataaagtatcagtgaaattagtttacccaaaagaatgtaaatggaaataaacatgtaagaagatctggactttattcataatagttttggccaggcgcagtggctcacacctgtaatcccagcactttcggaggctgaggcaggcagatcacgaggtcaagagatcgagactatcctggccaacatggtgaaaccccgtctccactaaaaatacaaaaattagctgggcgtggtggtacacgcctgtagtcccagctacttgggaggctgaggcaggagaattgcttgaacccaggaggcagaggttgtagtgagctgagattacaccactgcactccagcctggagacagagtaagactctgtctcaaaaaaaaaaaaaaaaagaagatgctgaactttattcataatagttttagaataataaaattgtttctaaactttgtaacttaatgcattattattgttattattgggtttttttgagatggagtcttgctctgtctcccaggctggagtgcagtggcaccatctcggctcactgcaagctccccctcccgggttcctcagcctcccaagtagccaggactacaggtgcccaccaccacgcctggctaatttttgtattttgtttaatagagacgggtttcaccatgttagccaggatggtctcaatctcctgacctcatgatccacccaccttggcctcccaaagtgccgggattataggtgtgagccaccgcacctggccacttaatgcattattttaatgtaaattgaattgaccactttttaaatgatggaacacctaaatggaattctataccactgttacagagaataagtctgctttatatatgctgacatagaaagatagtcacaacatattaaatggataaaaagcaatttgcaggcagggcacggtggctcatacctgtaatcccagcactttgggaggccgaggtaggcagatcacctgaagtcgggagttcaagaccagcctgaccaacatggagaaaccccatctctactaaaaatacaaaattagccaggcatagtggcgcatgcctgtaatcccagctactcaggaggctgaggcaggagaaacacttgaacccaggaggcagaggttgcggtgagccgagatcacaccattgcactccagcctgggcagcaaaagcaaaactctgtctcaaaaaaaaaaaaaaaagcaatttgcaagctgggcgtggtagcttgtgcctgtaatcccagcactttggaaggccgaggtgagtggattgttcgagcccaggagtttgagaccagcctgggcaacatggtgaaaccccatttctacaaaaaaactttttaaaaaaaattagctgggagtggtggcgcaggcccatagtcccagctacttgggaggctgtagtgggaggatctcttgaatgtgggaggcggaggttgcagtgagccatgattgcaccactgcactccagcctgggggacagaatgagaccctgtctcaaaaaaaagcaaaacaaaacaaaaaagcaatttgcagaacagtaggtaaagtgtgatttcatttgaggggcaaaaaggaatatatgtaatatatacatacatgtaatatatgtacacatgcatatatatcatgtgtttgcacataaaaagtgattgcagagaggagacatatcagtgttaatcacagttgcttctgaggataaaagtaagaaagaaagtgggcaggagttacttttatttcatataattttacccacttcgggtttttgtttgtttgtttgtttgttttgagatggagtttccctcttgtctcgcaggctggaatgcagtggcagcaatctcggctcactgcaacctccgcctcccaggttcaagcggttctcctgcctcagcctctggagtaactaggattacaggcgcccgccatcacacccggttaatttttgtatttttagtagagacggggtttccatgttggccaggctggtttcaaactcctcacctcaggtgatccacccaccttggcctcccagagtgctgggattacaagcgtgaaccaccacccccggccccctctttgggattttatgagctttggtcattttggtaatataatttttttttcttttctgagatggagtttcacttttgttgcccaggctagagtgcagtggctcaatatcggctcactgcaacctccgcctcccaggttcaagtgattcacctgcctcagcctcccaagtagctagaattacaggcatctgccaccacacccagataatttttgtatttttagtagagatggagttttgccatgttggccaggctggtctcaaactcctgacgtcaggtgatctgcctgcctcggcctcccaaagtgctgggattacaggtgtgagccaccacacccggccagtaatataaaaatacttaaaggtagaaaaaaaccctattaaaatatgtaagctgggcgtgatggctcatgcctgtaatccctgcacttgaggagactgaggcaggaggattgcttgaggccataatttcaaagaccaccctggcccacatagtgagaccttgtctctattaattcaaacacacacacagagcacattaggaatacaagcaatggtagtttttttaaaacggtgtttgtattagtttaacaaatgaattactgaggtagtgttagcttcttgaacccaggattcacacctggtttggctttaaagcttccacagtatcttgtacactacctgctcatgtaaatagtacctacttacggccgggcatggtggctcacgcctgtaatcccagcactttgggaggccgaggtgggtggatcacaaagtcgggagttcaagaccagactggccaagatggtgaaaccccgtctctactaaaaatatgaaaattagctaggcgtggtggtgggcgcctgtaatcccagctactgggaggctgaggcaaagaattgcttgaacccaggaggcggaggttgcagtgagctgagattgcaccactgcgctccaacctggacgacagagcgaggctctccttctaaaaaaaaaaaaaaaaaaaaggtacctacttatataaataaatatacaaccaagaagtccataaaagctcttctttcctctacccagaactctcttccccctcatctttgatcgtttaaatcccatcatccttcgaggcctgactcgaatgccagctcacgtcagtaatggtcatggattgatttccagctctggatccagcatcgctctgcacacccacatattttatcttccttcacaataatcttcacaagaatcctgacatagatgctggtctttcctatttacataggaaaaaatgggcctttacagttatgaagcttattcagtgtcacatgtgtcataaattagtgatggagatgagataagaaacctcacctcctgacctggttcattcggaattcattctactttactccatggacttcgccctaatcgctcaaacaggaagcaatactttcttcctctcaactcttctaacacttggtgagtgcctctgaaagcacatattagtttctactttatgtttcatttatctgtgtacagcctcacatctctgtatgagaatgagagctgattctaatcatttcaatccatagatggcataaaaatcacctgtgatcttttaaaacacatttatgtcacagactgaaggaatcagaatttctacacttggtacctggctatctgcatatttttaaacctgcatagttgatgctgatgcacactaagggcttaggacagctagcttcatccaagcttgattcatctttgaatttccatagtgccttcaaatagcaaatgccaggtggggcatggtggctcacgtctgtaatcccaacactttaggaggccaaggcaggtggatcccttgagctcaggagttccaaaccagccygggcaaaatggtgaaacctcgtctctacaaaaagtacaaaaattagctgggcatggtggtgcacacctgtggtcccagctacttggggggctgaggcggaaggattgcttgagcccagggaatcgagactgcaatgagctgtgatggcattactgcactgcaatgtgggtgacagagcaattccctgtctcaaaaaaaaaaaaaagagccgggcgtgctggctcacacctgtaatcccagcactttgggaggccgaggcgggcggatcacgaggtcaggagatcaagaccatcctggctaacacagtgaaacccccgtctctacaacaaaatacaaaaaaaaattagctgggcrtggtggcgtgcacctgtagtcccaggtactcgagaggctgaggcaggagaattgcttgaacccgggaggcggaggttgcagtgagccgagatcgtgccactgcactccggcctgggtgagagtaagactctgtctcaaaaaataataataataaattaaaaagaaagaaaagaaaagagaaaaagcagataccttataagtatttgttgacttatccataatcattaattatttttataaatccaaatatggaatcagagctgcctttactggaagaaaagtctaagtgtttgggtaatagagacactatgaggatcaggtagtttaagcaatgtgggggtggctagtgggtgaactatgaggattaaaggtgccggctgggcactgtggctcacgcctgtaatcccagmactttgggagggtaaggcgggtggatcacctgaggtcaggagttcgagaccagcctggccaatgtggtgaaaccctgcctctactaaaaatacaaaaataagccaggcgtggtggcaagcgcctgtagtcccagctactcaggaggctgaagcaggagaatcgcttgaacccaggaggcagaggctgcagtgagccaagatccgccactgcgttccagcctgggtgacagagcaagactctgtctcaaaaaaaaaaaaaaaaaaaaaaaggtgccacaaaggtgtgctcagaaacagccgtaagaaatgaggagaccaggcttatcaggtcatcgcttaggctagcagctgccctttcaaaatagctctgtgctttcttttccttttttttttttttttttttttgagacagggtcgtgccttgtcatccaggctggagtgcagtggcacaatcacggctcactgcaacctccacctcccaggctcatgagatcctctgaccttagcctcccaagtagctgggactataagcaycatgcaccaccatgttcagctaatttttaaattttttttgtacagacggggtcttgctatattgcccagactggtctcgaactcctgggctcaagcgatcggcccacttcagtctcccaaagtgactggagtggagttacaggcatgagccaccacacccagcctggcctttctttttctttgaaggttactctaattttcttacttttattttcttctttattattattttttgtttctaataaacattgagacagccttcaaagttaccctaattttatccagattacatctgcttaaaaattgtacgatatatttgaaggataaagagtttgccttggctccctcaaattctctgaaacttgtaagatagtgaaacaggactagatcctactggcagtgctttgagaaagaatgaattgatatgtgaagaggaaggagacttaaggggaccacggctggaatgtggtcaaacaggacggaccacatatgcaccataaaggctgatattcctagtctgaggaattgcctattcaaggaatcatttttggtgatatatctgcctagtagccaaatactctgataagaacaaaaacccgtgtgtgtgtstaagattagctgatgcttcacttttctcaatgttttatattgcatattatcataagaagtctcactggatcaggccgggcgccatggctcacactggtaatcccagcactttgggaggccgaggtgggtggatcacctgaggttaggagtttgagaccagcctggcccacatgtcgaaaccctgtctctactaaaaatacgaaaattagccaggtgtggtggccggcacctgtaatcccagctactcaggagactgaggcagagaatcgcttgaacccaggaggcggaggttgcagtgagccaagactgtgccactgcagtccagcctgggcgaccaagagagactccatctcaaaaaataataataataaatagatcagttaatagggttgaaacaaacaaaaatggaaatatataaaaagaaacaaaaacgaaagaaaagaaatctcattggaaatctcactggagatttttgcataaatttgatccaaaatggactgctcttattacataaggattatagagctgacccatgattagtaaagtatatgcttgagttgtttttcgtaataatattatttcataatatcattaattaatatatttgtgcacatactctgctatatgataaggatatacaatattataaaatatacttcccagactgggtgtgttggctcacacctataatcccagcactttgggaggccacggcaggaggccgtgtttgagagcagcctgggcaacatagagagactgtgtctctacaaaaactttaaaaaattgtcagggcatgatggcatgggcttttagtcccagatactcaggaggctgagcggggaggacctccccgcttragcccacaatgcagaggttgtagtgagctgtgatagtgccactgcattccagcctgggtgacagagccagaccttgtctaaaaaacaatagagtaaaatatacttcctatccttaatgggcttccagccccaagagggagacataacagttatgtaaaaagtaaataccagctgggcacagtggctcacgcctgtaatcccagctctttgggaggctgaggcaggcagatcacgaggtcaggagttcaagaccagcctgaccaacacggtgaaacccatctctactaaaaatacaaaaattagccaggcatggtggtgaccacctgtaatcccagctactcaagaggctgaggcaggagaatcacttgaacccaggaggcagagttgcagtgagctgagatcgcgccattgcactctagcctggccagcagagcgagagtccatctcaattaaaaaaaaaaaagtatgcataagrtactaagggaggccggcatggtggctcacgcctctaatcccagcactttgggaggccaaggcgggcggatcacctgaggtcaggagttcgagaccagcctggccaacatggcaaaaccctgtctctactaaaaatacaaaattagccgagcgtggtggcgcatgcctgtaatccaagctactcaggaggatgaagctcgagaatcrcttgaacccaggaggcagaggttgcagtgagccgagatcacgccattacactctagcctgggcaacaagagtgaaactccgtatcaaaaaaaaaaaaagaaagaaagatactaagggagcacagagctggaatacttgggccagctagtattcagagaaggtttggagaaagtgctgcttgagtggatctggaaggatgaaaatgaagttgtcaggtgaacaaacatgggcagggttttctaggctgcaggaagagcaaaagcaaaagcccataagtggaaaaatgttaaaaagcatgccatgttcaagaaacatgcagatttattacagtgtcaagtgcatgattggatttttggaggatgagtctggccaggtcatgcagggcctgtaagccatgttaaagaacttggacttaagctgtaggcagagggagctgttaaaagcatttaagcagaggagtgacatgatttgtttcatgtgtgtaagtaattctagatgtagtacagaggacggataaaaaaataagactgcaggcaagcagattccttaaaattgyattcctatagttttgtcaaaatactattgagggccataactagataaggataaagaggacagatctaggaaaccaaggcagatttttaaggagggaaaaggaggacttggttattgactaaacatatatgaaggagagcaagagatctaatttccgtggttctaatttggtttttgtttgtttgttggctgagttttttatttgtttgtctttagacagcatcttgctctgtcactccaggctaatgtttttgttttgttttgttttttgacacaaaatctcactcttatsccccaggctggagtgcaatggcgtgatctcagctcactgcaacctccacctcccaggttcaagcgattctcctgcctccgcctcctgagtagctgggattactggtgcccaccaccacacctggctaatttttgtatttttagtagagacagggtttcaccatgttggccaggctggtctcgaactcctgacctcaggtgattctcccgcctcggcctcccaaagttctgggattatggcataagccaccatgccagaccctcgggctaatgttttttatgtagagacgaggtctcactacgttgcccaggccagtccctaactcctggcttcaagtgatcctcccacttcccatgtttctaatcttgatggtggtcacgtgaactaagtttgagaagctaggaaatgaacaggttttgggaggaggatgatcagatctgatttggggaagggaatgagagagaagagaagctagagaggaatgaaagatcaaggaaagttttttgttagtgtgtttgttacgttttattgtgtgaataacttgaacatgttcataggcttggacgtagggttgtattctattctgcatgrtaggaactcagtaaatattttttgaaaaaatgaaaagattgcgaagccgatgcaggtagatcatttgaggtcaggttttcaagaccagcctggccaacataatgaaaccccgtccctactaaaaatacaaaaattaggcggtagtggcacgcacctgtaatcccagctactcggtaggctgaggcaggagaatcacttgaactcggaaggcagaggttgtggtgagctgagatcacgccactgcactccagcctggatgacaaagtgagaccctgtctcaaaaaaataaaataaaataaaataaaaataaaaataaaaaatggaaagcgttgagaggaagaaactagagataaagagaatatgactgaaaaagcaaggtccccaggaaaaccatatgcggtcgtgtcttagtctgtttgggctgctataacataataccataaaatactgggtggcttataagcaacagaaatgtatggctcacagttttggaggctgggaagtccaagatctgagagccagctttgttgggttctggtgaatgctctcttctggattgtggacttcagacttcttgctgtgccctcacatagtagaagggactagctagctctcttgagcctcttttacaagggtcaggatttcaacacataaatttggggaggacatgaacattcaaaccaaagccagtagaattaggagcaaaggtggatgacttggtcttggtcttgagcgatagaaggatatttcaggyctggcgcagtggctcagccctggcgcagtggctcagcactttgggaggccgaggcgggcagatcacttgaggtcagaagttcgagaccaacctggccaacatattgaaacctcgtctctactaaaaatataaaaattagccaggtgtggtggtgtgcacctatagtcccagccacttgggaggctgaggcaggagaatcgcttgaacctgggaggcagaggttgcattgagcccagatcgcaccactgcactccagcctgggaaacagagagtaagactcaaaaaagcaaacaacaacaataaaaaaagagtagtgtggtctgggcgtggtggctcacgcctgtaatcccagcactttgggaggccaaggcgggtggatcacgaggtcaggagttcaagaccagcctgaccaacatggtgaaaccctgtctctactaaaaaaatacaaaaattagctgggcatggtggtgcacgcctgttattgcaactactctggaggctgagacagaagaattgcttgaacctgggaggcgcggaggttgcagtgagctgagatcgcaccactgcactccagcctgggcagtggagtgagactctgtctcaaaaaaaaaaaaaaaaaaaaagagtagtgcgatgtgtgtctttcagggttttccaaagaaacagaaccagtaggagtatatatacactcttattatatatctatatgatatatagagtaagcaattgtaggagcgaacaagtctaaaatttgtagggcaggccgacaggctgcaagctcagaacttgggcaggaggtgacactccagtcttgaggtctcgaggcagaatggaaacctcagtttttctcttaaagttttttttttttttgagacaaattctcactttattgcccaaggctgaagtgcaatggcacaatcagctcactgcaacctccgcctccctggttcaagagattctcctgcctcagcctcctgagtacctgggattacaggcatgtgccatcacgcccagctaatttttctgggttttgtttgtttgtttgtatgtttgtttgagacggagtcttgctctgtggcccaggctggagtacaatggcacgatctcggctcattgcaacttccgcctctcgagttcaagcgattctcctgccctcagcctcctaagtagctgggattataggcacccgccaccacgcccggctaatttttgtatttttagtagagacagtgttttaccatgctggccaggctggtctcaaactcctgatctcaagtgatctgcccacctcggcctcccaaagtgctgggattataggtgtgagccaccgcacccagctcattatcacaaactttcttatctcctgtttgttctcctgaaaacccatttatttttccaaaatggtcatttgttttctcacaagtgcctttctctccttccccttcaccaattaagatggcatataagccccaaattctagccacccctttgaattagtcatcacagaattctcccatctgtatacaccttgcacatgtgagtgtgaactcttttttatttttctcctgttaaggtatcttctgtgagtttaatatgcaggccctagctactgaatctaagaaactgagaagtggctgggttgggggctcatgcctgtaatcccagcactttgggaggccgaggcgggcggatcgcctgaggtcaggagtttgagaccagcctggccaacatggcgaaaccctgctcctactaaaaatacaaaaattggctgggtgtggtggtgcatgcctgtaatcccagctactgaggaggctgaggaaggagaatctcttgaacctgggaaatggaggttgcagtgagccgagatcatgccactgcactccagcctgagcaacgagagcgagactccatctcaaaaaaaaaaaaaaagaagaagaaaagagaagaaaaagaaaaaagagcaagaaatgatgtgagaaatttttctgaaacatgagaggattgccgtcttcctttgggcagggacacgctgactggttaaggcacttgcttcaatcaatcgaaatgtaagcaattaatgtaaccgcgagcacagatttacaagctttctccatttgacataagatttatttatctgggttggtgttttcctgagtttcatttctatttttaggtttgagtttctttctaagggacatgtggatacgacttgtaaattataagcttggcgttttggcaactgcaataacaaaaacctgaagcaagaagattaaaaaccccgcctggcctggacgcacttcacttactttgttagactggtaacttcttgccaacagaaacttaaagaagcactttctgcaattaatatggtaactaccattaatggctttgttttctccagacaagccaacagcactggcattagtctttagtctcgatgaactggttctgagaaatgaaaagcatgggagacagaatagcacccagcagcgaatctagctgcaaaatgctttttggtcctccaaggtgaattaaaaccttgaacttagaagccgatatgacagactttatttaatgtgtcagaaatgactggtgacacaagctttgtaacctccagtccaaatcttactaaacatgcagaccactctccatagcccctggggcaccaagcctcagggacgcccacagctccctggctctccagatccagattggtggcacttcatcctctcccaaaatacttcccttggattcttcatacctcaaggggtctctaacccactttcctacatgcagctgcagacctacagctaaggtgggactgagggagggagagaatgaatgttcgctattgggctctagtaccaagtacgttatctactttatctccttacctcacactatccctgtaaactaagcattattcttatcatcctcattttatcactgagcaaaatgagcttgagagaaatgaagtaacacactgccagtctcacagctagtaagtggtggaaatgggctcctactcaggaccttttgaattcaaacatggcaggcttcattaatctgcattgtaaaccaggattttacctacttagtttataccagataatttcctgagaaagagttgcctcttcccagtttgtctgtactaagtgtgtgtggaggagtccgacagcttaaccacgcagtgaacgtcccccaagacattttgtacttagtgccaacaagggaggatcaacctgggctttaatctccttggtgtgataagagagacatggaccatttaataagtgtagtgctgaagttagggggtgcaggtaggcacagcagccccggaggagatgaggtcctggctcacaggtcctgagttcccagatagcacaatgagctgccagttcccttccagcaccagaagtaacatatcacagggcaacgtggctttacccttctccaggagagtttcgtacccatggtctcacttaaacttcaaacactatactcagaaaataaagtggcaaggaaacattatttttctttctttctttcttttttcttttcttttctttctttttttttttttttttttgagacggagttttgctcttgttgcccaggctagagtgaaatggcacgatctcggctcactgcaatctccgcctcctgggttcaagtrattctcctgcctcagcctcccaagtagctaggattacaggcgtgcaccaccacacccagctaattttttgtatttttttttttagtagtcacagggtttcaccatgttggccaggctggccttgaactcctgagtttgggtgatccacctgcctcggcctcccaaagtgctgggattacaggcatgagtcaccgcacccagcctgagccaccatgcccagccttttttttttatgtttgagacagtctcactctgttgcccaggctggagtacaattgcatgatctcagctcactgcaacctctgcctcccgggttcaagcaattctcctgcctcagcctcccgagtagctgggattacaggtgcctgccaccatgcctggctaatttttttatttttagtagcgacagggttttaccatgttgtccaggctggtctcaaactcctgacctcaggtaaagcctcccaaagtgttgggattacaggggtgagcccagcctgaaacttttattctacccttcactctgtgtgctagaaccagaagagtcatcttatcagcctgttcctggctaattgcagttaataaatgcataatactagtctgagtgtccacaggaaccagactgtttcttagtctcccttgaacttgtgaggacatgagctgaataatttggagtgacaattgatctatgaaagattcccaaatgacaaattcaggaaactcacaagtgccatttggagatggtggtaccccctccactccactgaggaagctcttgaatggccatcagaagtacttctgttggccaaatccagtaaaaatttttctgtttatttattttgtttgtttgtttgttttttgtttttttttgagatggagtcttgctctgtcacctatgctggagtgcagtggtgcgatcatggctgatggcagcctcaacctcccaggttcaagccagctccccacctcagcctcctgagtagctgggaccgcagttgcaagtcaccacacttggctaattttttgtagccatggggtctcactctgttgaccaagctgacctcaagttcctgggctcaagtattcctcctatcttggcctcccaaagtactgggattacaggcacaagatatcatgcccagcccaataaacatttttctttcttttttttttttttttgagaaggatttttgctcttgttgcccaggctgaagcacaatggcgtgatctcggctcaccgcaacttctgcctcccaggttcaagcaattctcctgcctcagcctctcaagtagctggaattacaggtatgtgccaccacgcctggctaattttgtatttttagtagaaatggggtttctccatgttggtcaggctggtctccaactccagacctcaggtgatccgcccaccttggccttccaaagtgctgggattagaggtgtgagccaccgcgcccggcaacatttttcaatcttcatcgtactggaggttagcaattcacacatgtggccagtggctccttataacactctttttggtacctgtgacactatactctcttggattttctgccacctgtctggctgtaccttttccattttctttgttaacttgctggcttgtgcaacaattaaatgtagtgagttcctctgatgtcagtccctgggtcctcttcttttttcattgtatactttctgcttgggcagtctcaccccttcctattggttttttcagtgattcacacatttataccaccaacctagttttttcatatatcatgagatacatatatccaactagtgtttaatatctccacttggaagtcctacaggcatctgacacctaaaatgttaacactgaagccggtctttgatcttcattacccttctcgttgcaacatccttcattatttctcaactcagctaatggcaccaccaactcccagaagcacaagacagtaacctggaagccatccttgatagctctctctccgtcacctactgcatctacaccatgtctagtgtcatcggttctatctccaacatgtctcaaatccatacttctctgccatcacctgktccaaactagcatcttctctgccctaacctatcgcctataacctcctaactggtctctcttctcttttgtccttcttccattaattctcttttttaaaggtaattcagagcaagaattaacattcttcagtagctttccattgcactagggtagaatctagaatccttactcaggcctttgcctgtctctctaggatcttttcaagccgttctgttccttccctaactatgcttcagccacacttctccttcatttatagtcaagctctttctgaccacaggacctttgcatacactgtttcctttgcctggaattctcttccctcctcttgccttgctttgccattctccttccccatacactagttgcctggctaacttctacttgccttcaggcctccatattctcccctcagagaagcctttcttaactttccaatctaaaataggtccagctgggtatggtggctcatgcctgtaaacccagcactttgggaggctgtggtgggaggatcacttgagaccaggagttccagatcagcctgagttacataggaagaccccatctctataaaaaataaaatacatcccttcttgtccttctttctcatagcttttcattcataatgtttactacagtttgcaattataattgtacattcattgatatgttaatttgttcagtatcttttttccccatagactgaaagttccctgggagcacaaatcacatgtcttttgtgtactgcagtatgcccacycccacttaccaaagtgcctgagacatagtaggcctttaataattgttgaatgaataaattaatgtcctcctgataggcatacttgatggtgaaactagacatcagagcctgatgcaagtaaatatttaagtcagttatatagtttggctgtgtccccacccaaatctcatcttgaactgtggttcccataatccctacatgtcgtgggaaggacccagaaggaggtgattgaatcatgggggcagtgaccctcatgctgttctygtgatagtgagtggattattttcccgggctttgctcagcacttcttgctgccgccatgtgaagaaggacacctttgtttccccttctgtcatgattgtaagtttcctgaggcctcgccagccatactggaactgagttaattatacttctttcctttataaattacacagtcttgggtacgtctttattaccaacacgagaatggactaatatagtcagcttgtttagacccctctggctgggattctaggctcaccaaccagctttttgataatttgccttttcttttcttttcttttcttttttttttttttgagacagagtctcgctctgtcaccaggctggagtgcagtggcatgatctcagctcactgcaacctccgcctcccgggttcaagtgattctcctgcctcagcctccagagaaggtgggactacaggcrcgcaccaccatgcctagggaatttttgtatttttagtagagacggggtttcaccatgttggccagaacggtcttgatctcttgacctcataatctgtccaccttggcctcccaaagggctgggattacaggcatgagccaccacactggccgataatttgccttttcatttttaatttaaatagcctcaggtcccacagaggctgtaattgagctttaacacgcaaattcctgatatgttggctctcttagagagccacaggcctcagctcctgaaggatccccaactacttctcagggtccacttctccacccagccctctgctcctctggaaagatgtatgtctccagggtctctcctctggctttcccaaatgataaagccctcaaggatccacttaatgctctgtccctttcatcctcactatgctacaggtttgtcctaggaccgtttttgttccaaaaactcaattcaagctagttgaccacaaagaagacctggttaattctcataaccctggatgcgccagggccaaaccttaaggaaaactgtaatcgagaacctctaagctatccggctcctgccctctgtctctcgtctcagctgctctcctcctgttggcttcatcttctcttttttcagacaacttctctccatgttatatttggggatgtagctgctgcagttccaaggttttgtgcccaagtcccacatcccagacaggaaagagccttcctccacaggtctatttagaaaaatctgagggaaggtcattaattgatcagtcacatgcccagcttgggttacctctcagtcccgtgtggccaagggtgtggactcacaggtttggaaaggtgaggaagagtttcccgtaggaagggaggagggaggtgcagtaccagcagaagagaaaagatgtgaggcagtgttagcagatgcccactacactatcgttcatgcagaaataatgagattgcctttatgacttgaattgtgtcccccaaaaagatacgtttaggccatgtgtggtggcttacacctgtaatcccagcactttgggaggccaaggcaggaacatcacttgagcctaggagttcgagaccagcctaggcaacatggtgagacccccgtctctacaaaaaatttaaaaatgagctgggtgtggtggcaggagcccatggtcccagctactcaggaggctaaggagggaggatcacgcattcagaaggtcgagactgcagtgagccatgattttaccactacactgtagcckgggtaatagagtgagactctgtctcaaaaaaataataataataaaataaaacatatgttaactttgctgctaattagtttaagattctgaatttgcaaaggcaaagaccaaccttcctgggcctgtctggaggtgtctaacagaaagctggatgactagatgatagctgtctccatgatatcagcttgttcctttccatggataaaatggattcaggggccgggcgaggtggcttatgcctgtaatcccagctactcgggaggctaaggtatgagaatcgcttgaacccgggaggcagaggtttcagtgagctgagatggtaccactgcactccagcctgggagacggagcaaggcattgtctcaaaaataaaaaaataaaaaataaaacaggctgggcacggtggctcacacctgtaatcccagcactttgggaggctgaggcaggcagatcgtgaggtcaggagttcaagaccagcctggccaaaatggcgaaaccctgtctctactaaaaatacaaaaattagctgggcgtggtggcgggcgcccgtaatcccagctactcggcaggctgaggcaggagaattgcttgaacctgggagacagaggtttcggtaagccgagatcctgccactgcactccagcctggcaacagagcragactctgtctcaaaaaataaaataaaataaaataaaatggattcaggtgataacactctttcctgcctacggaccctgtccctctatcctaagaggtgtcctctgattgaggattaggactaaacatggctgtttcccacttcatccctcatggctgctgtaatttttattttatctttatttttatcctacagaaagtaaaatactcccaatagattaactctactattacgtagttgtttcttcaaatgcccaagaatacttgtccttgggtataatttttttgtacccctaagtagttatgagtgtctgtttgtgtgcatggatgctttgcttcaaatgagttgcttttacaatgtgataaccttgtgccatatgttgggcaactatcttggccataattcacaggcaactgacacattaatagattctctgcccgttctcattgtggagattctgtgttagtggcctttgtcttccatggaactgacagaggggcaggattagctcactgacgctcggaacacaagtgacgagggatttcatgaaaacaaagccaaacaaacgaggcagcttccacgggcacctggctgaataaattaaacttgattgaatcctctattgtaatgacgacagaaaaggaggtaaaatatgccttccctaatgagtttctttacagtcatttactatttaaaacttgctattccaggaaagcagcaatcgcgtaagactgctttgactgggtcttgaaggctctgtaaaatctgtgggctcacagaaggattttgcatacttcctgcaagcatagttactggacaatgttgcttcaaagccaagctagcaagggaaccctatactctcttcctcttggcctgccctaggttctgagtggtcacatgaagatggcctcaaagcagaagaaactaaatgtgccaagcagggaaaagtctgaatcgaagtaacagtctaaaaaaggctataaaaataggaacaatgtaggtgcagcttttacatgaaagaggaagaaacagcaccaagatttactaataagcttggcacagagaaacactgctggccaggtgtggtggttcacagctgtaatcacaacactttgggaggtcgaagcaggaggatcatttgaggccaggagttcragaccagcctgggcaatataatgagactggcccatcactacttaaaatgtaaacatttagctggggatggtggtgtgctcctctagtcccagctactggggaggctgaggcaggaggaccacttgaaccccagaagtcaaggctgcagtgagctaagatcatgctactgcactccatcctgggtgacagagcaagaaccctgtctctaaggaaaaaaatagaaactgctgtcattgaatttaacattatctatgggtctttagtttgycatgaattgtcatcagcagtcagcatgagatacccaaatacaaaagtacaaaggaaaaaatacttttcactttgtaaaactgaacgcacacagcattacaaaagtgccctttgagggccgggtgcagtggctcacgcctgtaatcccagcactttgggaggccgaggtgggcgaaccacgaagtcaggagttcgagaccagcctggcgagggtggtgaaacccctctctactaaaaatacaaaaattagccgggcgtggtggtgcgcacctgtagtcccagctactcgggaggctgaggcaggagaatcacttgaacctgggagacggaggttgctgtgagccgaaatcgcaccactgcactccagcatgggcaacagagcgagacatcacctcaacaacaaaaaaaagagtgccctttggaaaggtgaatgtctrcatagtgtgagtttaatggagtcacatttgtctaaatagaaattcctctcaacctgtcattgcactctcttgccactgtgaacgtccaccaatagtgtcccatttgaaatatacaaaggcagtaacgtaggccccagaaaaatagggttaaaatatactgggattaaaatgttgccgaggagtcaaatgggtaactgaggttagcgttgacccattagtacatgttaggcagagaattagctattcaccttggtgtagaattgatgtttgatttctttgtgggatcagagggcccacccctaacaggaagtgaccaagggtcatgtagagtagaataaacaaagcatgtgaaacagcatgagaggcacagagaggcagcgtgtgtggtgagaacacttactgaacacattacagaaaattattattactgccgcttcctaagctgtaaacttttccaataaattaactaagttttataagcctcagtgtcctcatctgtaaaactagggtcaccatagcactgtcttgagattgttgtggaagctaaatacaaaatatattactgagctattttgccattgaaagtaatggcaaaatccacacttttggaccaacctaaatatataaacatgagcatacaagacctggaatgcactttaaaatgtgtactgccaaagctgggcacagtggcacgtgtctgtagtcccatctgcttgaaaggctgaggtsggaggatcgcaggaacccaggagttctgggcagcagtgaacagtgactgcgattgtgagtagccttcactacggccgggcaacrtaacaggattctgcctctaaagaataataaacataaaattaacttcctacccactgtctttcagggcaagccataactgtgaagggaaacaagttaaggaggacaactgactgcctaaggaaggttctggagtgtggacaaaggtggagatggctacttccactgattaataaaagccttctaggccaggcgcggtggctcatgsctgtaatcccagcactttgggaggctgaggcaggcggatcacctgaggtcaggagttcaagaccagcctgaccaacatggagaaaccccgtctctactaaaaatacaaaattagccgggtatggtggcacatgcctgtaatcccagctactagagaggctgaggcaggagaatcactttaacctgggaggtggaggttgtggtgagctgagatcacgccattgcactccagcctgggcaacaagagcgaaactccgtctcaaaaaataaataaataaaataaaataaataaaataaaataaaagccttcttcatgtcactattataaacagtacaaaccctcagctgctacttttggcaaactttttttttttttttttcctgagatggagtctccctccgtcacccaggactgagactggcccaatcttgcctcactacaacctccatcttccaggttcaagtgattatcctacctcagcctcccgagtagctgggattacaggtgcacgccaccacacccagctaatttttgtatttttagtagagacagggttttgccatgttggccaagctggtcttgaactcctgatctcaggtgatctgcccacctcggcctcccaaagtgctgggattacaggcgtgaaccaccatgcccggccttggcaaacttttgtaaagggtcagatagtaaatattttaagctttgcagtaaatatttttactcactattgcaactactcatgccagacattgtagcaaaataaaaagcatttcataggcaatatataatatataatgcatgagcatggcagtgctccaaaaaaacttttttttttggagacagggtcttgctctgtctcccaggctggagtgcagttgtgagaccatggcccactgcagtcttgacctcctgggctcaagcaattctcctgcctcaggtcccagaatagctgggactacaggctgcgccagcacaccccactaaattttgtatttttagtagagacagggttcagccatgttgcccaggctggtctggagctcctgggttcaagcaacccacccatctcagcctctcaaagtgctgggattatagtcgtgaaccactacgcccggccattttttttttcttttcagataggatcttgctctgtttctcctgctggaatgcagtggcacaatcatggctcactgtagcctcgacatcccagactcaagtaattcacttcagcttccagagtaggtgggacaacaggcgtgcccactgagcctggctaattttatttttgtagagatggggtctcactatgttgccaaggcaggacttgaactcctgggctcaagtaattctcctgcctgggactcctgaagtgctgggattacaggtgtgagccactgcaccctgcctccaataaaacttaataaatactaacagttacttccccaagcattgaaaactcttctacaacatgagttttaatgatggcataacagtccatatagattttcatgatttatttaacaaagtctttaatgttggacatttagtttctctttatttgcttacctcaatcggtactcataattattttgtaacaatttctttttttagacggaatctcgctctgtcacccaggctggagtgcattggcgagatctcagctcactggaacctccgcctcccgggtacaagcgattctcctgcctcagcctcctgaacagctgggactacaggtgcccgccaccacgcccagctaatttttgtatttttagtagagatggggtttcmccatattggtcaggctggtcttgaactcctgaccttgtgatctgcccrcctcggccacccaaagtgctgggattacaggggtgagccaccatgcccagcctatagaaattatttttaaagtcgggatgagaaaaaaaaaaaaagaaaaaagaaagtggggataagaaaaagaaaaattgctcatagaccatttattcagagattataactgccctcctcattattatatatgcttttcaggcttatgattacctttattatttatttatttatttatattttttagacagagtcttgctctgtcatcacccatgctggagtgcagtggtgcgatctcagctcactgcaacctccacctcccaggttcaagtgattctcctgcctccgcctcccgagtagctcacattataggcacgtgccacaatacctagctaatttttggttttgtgtgtgtgtgtgtgtgtgtgtttgtttttgtttttttttttttttgacggagtctcgctctgtcgcccaggctgtagtgcagtggcatgatcttggctcactacaacctccacctctggggttcaagcaattctcctgcctcagcctcctgagtagctgggattataggcatgtgtcaccatgcatggctaatttttgtatttttagtagagatggggtttgaccatgttggtcaggctggtctcaaactcctgacctcgtgatcgcccacctcggcctcccaaagtgctgggattacaggcatgagccaccacgcccggcctaatttttgtatttttaatagagacaggctttgccatgttggccaggctgtattatcacctttaaataaagctggggttacactgtacatcctatattgtaacctgaattttcacttcaccacagtaatgaaggtcttctccccttctgaggtcctaaacttagaattgctggtctctgacttccattattctagttttacttctgtcttcccactgtctcacatctactcccataagggagaccacactgaccatctgctcctcttggcattatatttcttactataaaactacacattggcacctggcttgcacatctgtctcttaggagtttggttactgttagctctgtgagcctgagtgatcacctcaactatcctagcaaaataggagagttggggccctccaaagctgagaatttgggcattatgacctaaataaagcaacacaatactgtctgagcaactagtcaaacccaaccagcctccttctctgacaactttattttgctttctttaagtgccataccaattattataagtgatgactagtatttatcattttaaatggcaaacaaccctaaatggcttggtggagggcaagttcagacattgtcctggagactggctgagagtagaagcccctctgcagtgttctttgaagtgctgattttagttatataaaatgctaaattgcctctcccactgtcagaatagccttttatttatttatttatttatttatttatttttgagacggagactcgctctgtcccccaggctggagtgcagtggcaccatcttggctcacagcaagctccrcttcccaagttcacaccattctcctgcctcagcctcccaagtagctgggactacaggcgcccgtcaccacgcctggctaatttttttttttttttttgtatttttagtagagacagggtttcwccatgttagccaggatggtcttgatctcctgacctcgtgatccgcccgcctcagcctcccaaagtgctgggattacaggcgtgagccactgtgcccagcccaaaatagccttttatacctcttcctgtttatgttatcaagaagttagtatgtagacttcagaactcaattttgatctgctcttgattaaaccttggtttacagaactacggtagtttttcacattgtagagaaaaagttgaactattttaataatggattttctgtgtgtatagaaactcctacaattgatttaaattttttttttttttgagacagattcttgctttgtcrcccaggctggagtgatctcggctcactgcaacctccacctcctggattcaagcaattctcctgcctcagcctcccaagtagctggaattacaggcacccgccaccacactaatttttgtagtttttagtagagatggggtttcaccatgttgcccaaggctggtgtccaactcctgacctcaartgatctaccctcctcggcctcccaaagtgctgggattayaggygtgagccaccacgcccaaccttgagttaaatttctaaaaatctcaacataatgtgtttggctcctcttcttattatgcttagagttaggcactagcacatactagacctaaacttgactgatttgaaaagaccactgaaatccatgatttgctgcggatcctctgtgtctgctgtggccaatataaagaaacttggatgcacttaatttatgaagacaagctttgttgatctggaagttgaatgataaatgtgaatccaatgacgccatacccctgcggataatggcaggctggatgtagcatgttagccrtcatattctgtgtgctccctgygatgtgggcacttcccttccatcgtggtgaggccaaagcaaaggcacagagasctgaacacaaacatgaaaaacaccttaccacctgggagtcaggggcaggttcaggcacatccattcctctggcatttgagcagctgttttccacagcattaactcagcacggcagggtaagtcagattaaaaaccaataaaagagtagtatcctcataccaccctcaacgtcttcctgcttcaccaaaaaaccaataaaagactgaatgtggccctttatcagctagacctcaaaatcttctttgctttctatgcgtatttccaataaaaaagtacaaggrttgttaaaagtccttatttatttatttatttatttatttatttatttatttatttttagaaccagggtctcactctgttgcccaggctggagttcagtggtgcagtcatagctcagtgcagcctccaactcctgagctcaagtgatcctcccacttcagcctccagagaagttgggactacaggtgcatgctaccacgccaggctaatgcttttggttttttaagagttttgttgagtcagggtcttgctatgttgcccaggctggtctcaaattcctagcttcaagcagtcctcctccctcagcctcccaaagggttggtattacaggcatgaaccactgtgcctggccttaaagtccttttgaaacacaagacaagaaacatttggccgcgcacagtggctcatgcctgtaatcccagcactttgggaggccaaggcaggtagatcatgaggtcaggagttcaagaccagcctggccaagatggtgaaaccccatctctactaaaaatacaaaaaattagctgggcatggtggcacgtgactgtaatcccaactactcagaaggctgaggcagagaattgcttaaaacccaggaggtggaggttgcagtgagccaagatctcgccactgcactccagcctgggcaacagagcaagactctgtctcgaaaaaattaaaaataaaaatacaaaaattagctgggcatagtggcacgtgcctgtcatcccacctactcaggaggctggggcaggcgaatcgcttgaacccgggaggcggaggttgcggtgagccaagatcgcgccattgcacgccagcctgggcaacagagcgaaactcagtctcaaaaaaaaaaaaaarggaaacatttattgaacacctagtacattccatgcactgtagtgtgtgtggttttatttaatttcatctctgcccaaccctgggaaacggtctattagcagacgcagaggataaggcacaggacgatcaggtaacacacccagggccaaatatcataaatggcagaattcaaattaaagccaccttccaagccatgtccctcccatcgtcacaatactgcatgtctacagcacagttgatgggcataacccttcttagcaacagcaagcagctgagcagaaagtaattgcaggaggcagagccaagaggaaaacygctgagagtgctgacggtaggtggagagaacagaagcacacaccgtagggtgcaatcttagtgagctttgttttccttcaatagaggtgagttcagacccaggcatgtctctccaacattcatttcccctgcttcggcaccatagacttgaaggattggactcaggagttggggaggacacgggggaagttgctttcctggtgctgaggmccccggccaccgtggtagtgtacagcaagtacagggtaacagaagggccagcaggaggacacgsygcaatggtgtaccgagggacaggagagtgaatcagagccacaggacagagctccacctgtytccagggaagtgcatggggggctcccggaagccaaaggcagcgcccagaggcagtgtgaagaggccttcctcagacctcagggtttcggcagggatagtgggtgacctgtgtgctggctctccagaaactgaaagcagcaagagacacttgggctccttttttagtttttctggtttgttttgttttgtttttttgcaggcactcggtggttagctggaaataaaggtggaggaactgggcagttcaaaggcagagacggcttcccccacccccacctcacctcccctttcattcagaaaagccacaaaagcgtggccccagggtgtgtgtgaaaggagggaggagtgactccacctagctcctctggagtaaagagaggctgtgggcctggtgtcgtgcgtgcatgcctgcatgtgcctgtgtgtgtgcatgcttgcctggtgctcaagggtcaggggaagctggctgagaagactgaggagatggagggaggtggaggraagtgtaatagaaggaggtggaggaaggtggctgccatagagctttggctctggctggcctgagtctcttcctgaagttgcagctgcactttggggccaggcgctgttgacactgtgggtataaacatgtggccagcagcagaatagagactcagagtcttgagaaagaaagtggtgacttcccactcctccttccttctttcctgtacagagtctgccatctgggggcagagatatgggcaagccctcattataatactagcagtgaagggctgggcatgacaggtggaaacaccactgactctagaactcagagcatggaatttggtatggtggcaggcaggggtccagaggtagtatttgttatctattgctgtgtaacgaattagcttaaggtatagcagttcaagagaagaaatgtttattatctcacaatttctttgggtcagaaatacaggtgtggtttagctgaatgctttctggctgaaggtgtttcaggacgttacagtcatgccaccagctggggctgccaactcatctgaaggctcaacacagggggaccggagtccaagctccctcacatggtcaccagcaggattcagttcctcgaaggctgtcatttagaggcctccctccrtccctccttacaggtccttctcacagggcacttcgtgacatggcagctgactttctggrgaccatccaagtgagaaagagcccttagaaagaagtgacagtctttatataacctaatctcagaagtgacaactcatcccttctacaaggttctattattcaaaattgcatctgtaaatccagctcactcaagggaaagggattactaggagataggggtcactgggggccattctagaggctccctgtcacagcatccaagctgagacctacagaatgacaggagttcaccaggcagggaggcaggagggagttgggggacggcaggtgcagtgaaccatggttgtaactcagtatggctgcacagagagcactgcctgagggtgagcagtgctgtggagaggccagcagggcccagaacttgtaccatcttttaacccaggtttgtaagggtggactttatcctgcaagcatgaagatcctaaagcttgaggctaacggttaagatttggctttagaaagattacactgctggcccagctcagtggctcacgcctgtaatcccagcattttgggaggctgaggtgggcggatcacctgaggtcaggagttcgagaccagcctggccaacatggtgaaaccctggttctcctaaaaatacaaaaaaattagctgggcatggtggtgggtgcttgtaatcccagctatgcgggaggctgaggcaggagaatcgcctgaacccgggaggtggaggaggytgcagtgagccaagatggcaccgctgcactccagcctgggtgacagagtgagactgtatctgaaagaaaggaaagggaaaaaaaagaaagaaaaaaaaaagaaaagaaaagaaggaaggttatcactgctgtggggagaatggattgaagagagtaaaagagcagaggaaggccagctggcgggtgcggcaggtggggggattgaactgaggtgctggagaggctgaatggctggcagcagcgctgctgcagagctggcgtccctgggtgtaggaactgactgcttatgtccgtcttcctcctctggaacataagctcaatgaggacagggattcttgtttgtagtctctggtatccccagcgtttaggacagtggcactagatgaatgactaggacaccccaaggtttctggcttgagtaactgggtggagctattctctaagctgtgaggcacagagggcaaacatggacagaaacttaatatttgagaaatactgagtttgaggtgctttgtaggccatctgagaataaatgcctcgtaggcagttgacatgyggggatctggaaagcctcttaaagaaatggtgagagatggagacttgaaaatccaagcacctagacgcccgtgatgggagtagttaacatggccctgggaccctttcccagagtttctaggacaccttacgcagcaacagtgcttgctttgaaagatagtaaaggaagaaagtcttgccaattgtcattcacaaaagaaagtcaaaaatatgttgccagagaggacaggagaaagccaggaatcacgggaagccagaagagagcttcgagtactatgagaacagcacagtaggttaggtaaggactgaaaggaggccggtgagttgaagcccactgtgggtggggaggaaggagaaaaggaatgttttccagaaatgcaaagcattacttaatatttattttattttatttttttgagatggagtctggctctgttgcccaggctggagtgcagtggcacgatctctgctcactgcaacctctgcctcccgggttcaagtgattctcctgcctcagcctccagagtagctgggattacaggcgcccaccaacatggctggctaatttttgtatttttagtagagatggggtttcaccgtattagccaggctggtctcgaactcctgaccttgtgatccacctgcctcagcctcccaaagtgctgggattacaggcgtgagccaccatacccggcctattttatattatatttattttattttatattttttgctctgttgctcaggccgaagtgcagtggtacaatcatggctcactacagcctccacctcctgaktctcaagcaatcctcccaccccagcctcccagagtgctgagattacaggtgtgagccaccacacctggcctccattacttaaaaatgttttaaaggctggacacagtggctcacgcctctaatcccagcactttgggaggctgaggcaggaggatcacctgcagtcaggagtttgagagcagcctggccagcatggtgaaaccccgtctctactaaaaaatacaaaaattagctgggcgtggtggtgggtgcctgtaaacccagctacttgggaggctgagtctggagaattgtttgaacctgggaggcagaggttgcaatgagtggagatcatgccattgcactccagcctgggcaacagagtgaaactccgcctcaaaaaaaaaaaaaattaaaactgtcacttccaaacaccattaaaaaacaaagtgcctgattcggccgtacatgtactaaaattggaacactggaacggtaacagagaagattagcatggctcctgcacaaagatgacacrcaaattcatcaagcattccttttttttttttttttggagacagtgtttcactcctatcaccaaggctggactacagtggcgtgatctcagctcactgcaacctccacctcccgggctcaatggattcttctgcctcagcctctggagtagctgggactataggcatgcaccactgtgcccggctaatttttgtatttttggtagagacggggtttcactatgttacccaggctggtttcaaactactgagctcaagcgatccacccgcctcagtctcctaaagtgctgggattacaggcgcgagccactgtgcccagcctcatactttttatattcattttgaaaaaaaccaaacatacaaaatatagataagcatttagatcacaagttccccaaactggtctttgtagcagcaatttaggaatcacctgggtggtttttaaaaatacatattctgccrggcacggtggctcactttgggaggccgaggcgggcggatcatgaggtcaggagatcgagaccatcctggccaacacggtgaaaccccatctctactaaaaatacaaaaaaattagccgggcatggtggcgggcgcctgtaatcccagctactcgggagactgaggcaggagaatgtcatgaatccaggaggcagagcttgcagtgagcggagatcgagccactgcactccagcctgggcgacaagtgagactctgtctcaaaaaaacaaaacaaaacaaaaaaaaaccagattctgggtttgccccaattccataaaattaacctctcaagggtgaagcaggagaaactattttttaatgtgccaagtgactttgaagtgtgacaagctttttaaacattttatttggagttttctgcttttattatttttaattgacacataataattgtatatatttatgcggtaccatgtgagattttgatataggcatacaatgtgtaatgatctaatcagggtaattaacatatccatcacctcaaagagttttgacatcactcatttaaacctctaagaaatacttttcagctgggcgcagtagctcacgcctgtaaccccagcactttgggaggccgaggcgggtggatsacctgaggtcaggagttcgaaaccagcctgaccaacatggagaaaccccatctctactaaaaatacaaaattagccaggcatggtggcacatgcctgtaagcccagctactcgaaaggctgaggcaggagaatcacttgaacccgggaggcagaggttgcggtgagccgagattgcgccattgcactccagcctgggcaacaagagcaaaactccttggccgggtgcggtggctcacgcctgtaatcccagcactttgggagaccgaggcgggcggatcacctgaggtcaggagttcgagaccagcctgaccmacacggtgaaaccccatctctactaaaaatacaaaattagccggtcatggtggcacatgcctgtaatcccagctacttgggaggctgaggcaggaaaattgcttgaacccgggaggcggaggttgcagtgagctgagatcgcaccactgcactctagcctgggtgacagagcgagactccatctcaaaaacaaaacaaaacagaaaacaagagcaaaactccgtctcaaaaaaaaaaaaagaaatactcatttttctttgactttaagcccttttagaataaataaagcggtacaaaatattcatagattactaaactgttagaagccaattgttaaatttaagactttaatagggaacttaaagcaatcaagaaaataaactctccacaaagttttaaaaaacaactataaaatacatcctgtaggccgggtacagtggctcaatcccagcactttgggagaccgaggcaggcggatcacctgaggtcaggagttcgagaccagcttgaccaatatggagaaatcccttctctactaaaaatacaaaattagccaggtgtggtggygcatgcctgtaatcccagctactcgggaagctgaggcaggagaatcacttgaacccaggagatggaggttgcggtgagctgagattgtaccactgcattccagcctgggcaacaagagcgaaattctgtctcaaaaaaaaaaaaaaaaaatcctgtaggtttgttatcaagaaaatgctgatgactataattaggaytataaatttagttgagagtgagagctagattagtaaataaaattgtctataaacatttgtaaatcagtcatcctcctgggtacggtttgtaaaagaacccagtgcttaagtgaagagcagggacagctcctggctctggatgggggagaagtcttccttgtttcatagtcaaggaaagctcccagctgaccatcaccctcttctcttggaaaacgccacacctaccttcttgccattcctagagcgattttccagcctgagtggtatgactgcttccatttcctcgccactcttgtttgtccctggcagttcactttgattctcaaaagtccattaaaaccccttccaggtcctccgggatccctggccatgtaagctctgccaccaacagcagcctttctagtacaaagtctctagagctttccacagcctctggcttggtctctccctctccaggctggccacaggcccccagggacctatctgccatctcttggaaatatctttctaaattccccactccccctcctgcctttccacgactttgagttgcaatagtttgcccagttccccttttccttgtagtctttaaagataagtccacaggtttttcatttgtttataagatttactctccatcaggaaatgaaaataaacatagggaagctgataagtcacagctccccacccccagccgttgttccggggaagcctctctagcaaggctcagatgtttccatcttaaggttaaatcacaccaaacaatagaagccctttggtttcacctcagtgggcgggatgtgcctcctttcatggatctcctgccccacacaggatttctctggactccttagagtgtttcttcaaaactagttcaatctcgatctaattagtccccaaagagatgcaaaccaaacgagatgcgatttttgttctattaggagggcacamaaataaaaaataaaaattaagcctgataatagcctgtttgggccagcttgctgggaagcggactcatttttatactgctggaggggttcggaatcaagaatcttaaatatgtgcatccccttcaatccagtaatcccacttctaggaaaatatcctgaggagataatcaagatgtgcagtcaagaatttatgaacaaaagatactcactgcagagccataattgagaagaactggaaaggacttaacatgcctcccaggtggggcttggctctgcaaatcctcatctgactctatgatggaatgggatgcatccggtcatgcagtcatccgtgcgacaaatagttcttcagtacctactctgcgttaggtaaacaatgcagagtattgttaacttggctgggtaaacaggtaagttctcagcccccctggaaaatccatgatctcctaaagtaaagcaatttaaaattgttcacattatttgtgtgtgagtgtgagggggcgctttatcaccctccacctctcatycccccaccacaagcagttgccaaattcaaataatttttccttcaatgcctctcccgtgtgaccgctccttttctttcaaaagtaaatcctatgtctgggaggtaacccgatcaccgcggaaagaacgccgacatggaartcttaggattggtttctcgttccaggaagttgcgctactttgggcaaatcacgtcacctctgggactgtttctaatcagaataaagaaagggctggaccaatctttcagatcctttgaatccaatcatttttggccttatgacggaaccgtctgtagatgagggcatctgaatcctagttaaagggaagggacggtgaagcccttgaagatctggggcatatttcctgaacaccaaaacgggaaagggctgtctagagtgaaagtataagacagacaggccctgttccaggaagctccctgcactctgctcttctccycaagccgaccccaaactcacagccagctttagcaagcaggcccgtcatccttccaggtgctatgtaatattaagaagcagcagctarcaattattagtgctactaggggcaggagatttgcagttccctcgctttcacacaaaagtatgaggtctgttttattattcccactctaaaggcaaaatggaagctcacggagattacagaacttatgggaagtgacagggctatttgccacgtttatactggccagtcttcctctttttctcaaagggtggggtgggagagcagcctcccgtgttatcaccctctcctgcggcagaagacagaagcataggtcattttggtagtacgggtttgttgattaccaactgggagacagaggtgaggtaaatcacaagcatggatgttagcagggctgcagaagtttataaataaatgatcttagaatctccagcagccccrttctttcatttggtaaccggcctcctccctgccctcatccctgtagcgcccttcccccatgagggtgaagggtcagctctaaaaatgcagtcaggaaggaacaatgagagtcctctccccgcctgggagaaatgcaatttgcatctcagatgagctcagattggtgaagcctcgtttggactctgatccttgcagtaaggatctgctctgggaatctcctgtgacctgttgaggtttgctgctccaaaggaataaggagtctttgacattaatgtccatttaactcagggatctaaaaaggcaggttagtgttagarttctataggcaccccagaattgtacctaagagtgtgtgtgtgcgtgcatatgtgtgttttcctggggatggtgtagctttccttagattgtcaaaggaatttatagctgcccaaaggttaaaaacttgtgtgacaagtgagtgtgataaaggaggaacagtggtgcagatcctgtgggaggggagaatgacttaacaaacccagaggtgggggtgggagggaaagaattcaggtgagactgcactcagaggtaggattcytttttcttttttgtaggtaacattttttgttttcttactgtgtgccaggcattgttctaaactaaatatacaaggccaggcgcagtggctcactcctgtaatcccagcactttgggaagccgaggtgggtgggtcacttgaggtcaggagttcgagaccagtctggtcaacatagtgaaaccccggctctactaaaaatagaaaaattaaccaggtggctcgtgcctgtagtcccagctgctcgggaggctgagagaggagaatctcttgaaccccggaggaggatgttgcagtgagctgagattgcaccactgcactccagcctaggcaactgagaagactctgtctccaaaaaaaaaaaaaaaaaaaaaaaagacaaatacgtaaactaaaatctatgagaattaggtaattctctctttttttttttttttgccagagttttgctcttgtcgcccaggctggagtgcagtggtgtgatcttggcttaccgcaacctccgcctcccgggttcaagtgattctcctgcctcagcctcccaagtagctggaattacaggtgcgcaccactaggcccggctgatttttgtatttttttagtagagacggggttacaccatgttggccaggctggtcttgaactcctgaactcaggtgatccacctgccttggcctcccaaatttctgggatgacagaagtgagccaccgcgcccggcctaattttttttttttttttttaagagacggagacttgctctgttgccaggctggagtgcagtggcgccatcttggctcactgcaagctccacctcccaggttcaagtgattctcctgcctcagcctcccaagtagctggaattacaggtgcgcaccactaggtctggctgatttttgtatttttttagtagagacggggttacaccatgttggccagactggtcttgaactcctgacctcaggtgatccacctgccttggcctcccaaatttctgggatgacaggagtgagccaccgtgcccagcctaattttttttttttwagagatggagtctcactctgttgccaggctggagtgcagtggygcgatctcggctcactgcaagctccacctcctgggtttaagtgattctcctgcctcagcctcccaagtagctgggactactggctggcgccaccacgcccagctaatttgtatttttagtaaagatggggtttcaccatgttggccaggatggtctccatctcttgacgtcgtgatctgcccgcctcggcctcccaaagtgcttggattacaggtgtgagccactgagcctggcctaaattttaaactatttgtagagacagggtctcgctatgttgctcagaatgttctcaaactcctgagctcaagcaatcctcctgccttggcctcctgaagtgctgggattaaaggcatgacccactgtgtccagccttttgtgggctttttgacatccttttatgtttttctttggtgaagtgcctattcaaatcatttgcacgcttttttttttttttgagatggagtcttgctctgtcccccaggctggagtgcagtgatgcgatctcggctcactgcaagctccgcctcctgggttcacgccattctcctgcctcagcctcccgagtagctgggactacaggcgccggtcaccacgcccggctaatttttttttttgtatttttagtagagacagggtttcaccgtgttagccaggatggtcttgatctgctgacctcgtgatctgcccatctcggcctcccaaagtgctgggattacaggcatgagtgagccactgcgcccggccatttgccctttttttgttgttgggctgtttatcttattattgcattttgagggttcattatatactctggatacaagccctttgccagatatgtgtgttgctaatattctctaccagtctgtggcttatctttgcattctcctaaatttctttcagagagcatacattctggtagaagagtacttagtcctgggcctggcagatttatttctttcaggacccaaggcctctgctgcaaacatgttccrccagatctttggtcagaataagaagcatatgagcttgatcattgttatggtcacaacttttgtatcccctcaaaattcgtacattgaaacctaatctccaatgtgatagtattaagagttggggtcatttgagaggtgatgaatgggcytcacgcccttataagagggccaaaggagattgtttaccccttccaccatgtgagtgcacagctgtaaggcaccgtctgtgaggaataggctctcaccagatactagcaccttggctcttggacttcccagcctccacaattatgtctgttttttgttttgttttgttttgtttttgagacagagtttgctcttgttgcccaggctagagtgcagtggcacaatctcagctcacagcaacctcttcctcccaggttcaagcaattctccagtctcagcctccsgagtagctgggattacagccacccgtcaccaagcccaactaatttttgtatttttagtagagatggggtttcatcatattggtcaggctggtctcaaactcctgacttcatgtgatccgcccacctcwgcctcccaaagtgctgggattacaggcatgagccaccacacccgacctgttgtttattctttataagtcatcccgcatatggtatttttttcttttctttttttgagacagggtcttgctctgttacccaggctggagtacagtggcatgatcatggctcattgcagcttcaacctcctgagttcaaacaatgctcccacctcagctttccaagtatctgggacaacaggtgcatgacaccatgcctggccaattttttgatatttgtagaaatggggtctccctatgttgcccaggctggtattttcttatagaagcctgaatgaacaaagacactgtccatctttttcttttttcttttttttttttgagacagagtcttgctctgtcacccaggctggagtgcagtggtgcagtcttggctcactgcaacctccgcctcctgggttcaagcgattctcctgcctcagcgacccaagtagctgggattgcaggcaagcgccaccacacacggctaatttctgtatttttagtagagactggatttcgccatgttggccaggctggtcttgaactcctgacctcaggtgatccacctgccttggcctctcaaagtgctgggattacaggtgtgagccactgcgcctggcccatcttttttttttttcttttctttttgtagagagagagagasagacagagttttgccgtgttgctcaggctgatctcaaactcctggcctcaagtgatcctcccaccttggcctcccaaaggatataatcccatgcctggaattacaggcatgaaacaccatgcctggccattcttaattttatgacatcctcacacttgtaatctcagcacttttggaggccaaggcaggtggatcaactgaggtcaggagttcgagacctagccttgccaacacacggtgaaaccccatctctactaaaaatacaaaattagccggtcatggtggcacatgcctgtaatcccagctacttgggaggctgaggcaggaaaattgcttgaacccgggaggcggaggttgcagtgagctgagatcgcaccactgcactctagcctgggtgacagagcgagactccatctcaaaaacaaaacaaaacagaaaacaagagcaaaactccgtctcaannnnnnnnnnnnnnnnnnnnnnnnnnnnnnnnnnnnnnnnnnnnnnnnnnnnnnnnnnnnnnnnnnnnnnnnnnnnnnnnnnnnnnnnnnnnnnnnnnnnnnnnnnnnnnnnnnnnnnnnnnnnnnnnnnnnnnnnnnnnnnnnnnnnnnnnnnnnnnnnnnnnnnnnnnnnnnnnnnnnnnnnnnnnnnnnnnnnnnnnnnnnnnnnnnnnnnnnnnnnnnnnnnnnnnnnnnnnnnnnnnnnnnnnnnnnnnnnnnnnnnnnnnnnnnnnnnnnnnnnnnnnnnnnnnnnnnnnnnnnnnnnnnnnnnnnnnnnnnnnnnnnnnnnnnnnnnnnnnnnnnnnnnnnnnnnnnnnnnnnnnnnnnnnnnnnnnnnnnnnnnnnnnnnnnnnnnnnnnnnnnnnnnnnnnnnnnnnnnnnnnnnnnnnnnnnnnnnnnnnnnnnnnnnnnnnnnnnnnnnnnnnnnnnnnnnnnnnnnnnnnnnnnnnnnnnnnnnnnnnnnnnnnnnnnnnnnnnnnnnnnnnnnnnnnnnnnnnnnnnnnnnnnnnnnnnnnnnnnnnnnnnnnnnnnnnnnnnnnnnnnnnnnnnnnnnnnnnnnnnnnnnnnnnnnnnnnnnnnnnnnnnnnnnnnnnnnnnnnnnnnnnnnnnnnnnnnnnnnnnnnnnnnnnnnnnnnnnnnnnnnnnnnnnnnnnnnnnnnnnnnnnnnnnnnnnnnnnnnnnnnnnnnnnnnnnnnnnnnnnnnnnnnnnnnnnnnnnnnnnnnnnnnnnnnnnnnnnnnnnnnnnnnnnnnnnnnnnnnnnnnnnnnnnnnnnnnnnnnnnnnnnnnnnnnnnnnnnnnnnnnnnnnnnnnnnnnnnnnnnnnnnnnnnnnnnnnnnnnnnnnnnnnnnnnnnnnnnnnnnnnnnnnnnnnnnnnnnnnnnnnnnnnnnnnnnnnnnnnnnnnnnnnnnnnnnnnnnnnnnnnnnnnnnnnnnnnnnnnnnnnnnnnnnnnnnnnnnnnnnnnnnnnnnnnnnnnnnnnnnnnnnnnnnnnnnnnnnnnnnnnnnnnnnnnnnnnnnnnnnnnnnnnnnnnnnnnnnnnnnnnnnnnnnnnnnnngcatgcctgtaatcccagctcctcaggaggctgaggcatgaggattgcttgaacccaggaggtagaggtgaggttgcagtgagccgagctcatgccactgtattccagcttgagtgacagagtgacactctgtcttttttgggggggtttttggtgccaattttaaatagttttatttaaaacattgcattttccacttacaatacagtgtttataaagtgcaatgttatttccttcccctgtgcatatgttccacattcaagtattgagaaaaatatggaatgcttcaccaatttgcttgccatcctcgtgcaggggccatgctaataatcttctctgtattgttccagttttttagtatatgtgctgccgaaacaagcatgactctgtctttaaaaaaaaaaaaaaaaacaacaacaacaacaacaaatgctggccaggcattatgctgaggtgggtggatcacctgaggtcaggagtttgaaaccagcctggccaacatggtgaaaccctgtctctgctaaaaatacaaagaaaattagctgggtgtggtggtgtatgcctgtaatcccagctacttgggatgctgaggcaggagaattgcttgaacctgggaggcagaggttgcagtgagctgagatcatgccactgcactctagcctgggcgacagggcgactccgtctcaaaaaaaaaaaaaaaaaaagaacacaggctatgggttaagcaaatgatagacctcaagcttatattattctagagaacagggagcatctggcccacgcaccagccctcatttgagtgacttatttttaggctttgcaacccacattaattgctctttttttttccttttttcaacatgttctaaaatcgtatatatttgaatcaaagtacagtacatgtcaggataaagaatcaaaagaattatcaaaaatattaggttgaatcctatggagttgttaacatttgcctttgacctttaaaagaggtaatttctaggccgggcgcggtggctcatgcctgtaatcccagcactttgggaggccgaggtgggcggatcacctgaggtcgggagtttgagaccagcctgaccaacatggagaaaccccgtctctactaaaaatacaaaattagccgggcgtggtggcrcatgccataatcccagctactaggggggctgagacaggagaatcgcttgaacctgggaggcagaggttgcgatgagccgagatcatgccattgcactccagcctgggcaacaagagcgaaactccatctttaaataaataaataaataaataaataaataaaagaggtaatttcttacaaaataaggatgtttgttcattatagtttttttggaatagagaaacattgggagctatttagatgtctttcttttctatttatttatttatttagtagagagacagggtcttagtatgttccccaggctggtcttgaactcctgggctccagtgatcctcctgcctcatcttcccaaagtgctgggattacgggttgagtcaccgtgcctgtaacgtttttcatcgtaacattgttcagaatagtgaaaaaaatgagagtaatctaaatgtcaaacaaatcatgccacatccatatcacaaaattaaaatcaatgttttagatttaataactcaatccctttgtgttctcatgaacacatgatttaatattggtttcatgacattaagttccatttatacatgctggaaactcccaaatttatatctaaagtccagctatagctccccaaatccagaccaagacattgaatttcctctgtggtgtcccagcaagttctggagtatggcacctcctcatggatgtgtccttggcacctgggggcagattccaaacaagtccacttattttaaatgtctcagtaaactcatttttatttttttgagactgggtctcactctattgcccagacaggagtgcagtggcacgatctcggctcactgcaaccttcacctctggggctcaagcaatcctctcacctcagccctgcaggtagctgggaacacaggcacgtgccaccacgccaggctaatattttgtatttttagtagagacggggttttgctatgttgcccaggctagtctcgaactcctaggctcaagcaatccgactgcctcagcctcccacagtgttgagattacaggtgtgagccgctgtgcccagcctcagtaaacttctttgccacccagagagaaggttgtaccctctgtcagggtctggttcaacctcaggcagagggggctcatttagatttgccttgactcaggcctatcggttttttttgttttttgtttttgtttttgttttggggggggacggagtctcactctgttgcccaggctggagtgtagtggtgtgatctctgctcacagcaacctctgcctcctgggttcaagcgattcccctgcctcagcctccagagtagctgggactacaggcatgcgccactatgcctggctaagttttttaatttttagtagagatggggtttcaccatgttagccatgatgatctcgatctcctgacctcgtgatccgcccgcctcagcctcccaaagtgctgggattacagatgtgagccacggcgcccagccaactcagccctatagttaatggctgttccctataaatgtttttcttatattaagagttttgttttcatcacctggcatcagatcctccattattccaatttcttgttattgtttgtgataggtaatcttagttcaacttaactgggccagggtgcccagaaacttggtcaaacattattctggatactactatgaaggtgtttttggatgagattaatggttttgttttttgtttttttttgtgatggagccttgctctgtcacccaggctggagtgctgtggcatgatctcggctcactgcaacctttgcctcctgggttcaagcgattctcctgcctcagcctcctgagtagctgggattacaggcgtgtgccatcatgcccatctaatttttgtatttttagtagaggcgacgtttcaccatgttggtgaggctggtctcgaactcctgaccctgtgatccacccacctcggcctcccaaagtgctgggattacagtgcctggcgagattaacattttaattggtggacttcgagtaaagcaaattactatccgtaatatgggtgggcctcatccagtttaaggagttaatataaaaaagactgacttcctcctgagcaagaagaaattctgccagcagactgccttttggcttgaactgtctcttccctgagtctccaacctgatggcccacaataaagatttagactccccaggcctccacaattgtgtragccaattccttaaaatgtttctctatctataacatatcctattagttctgtttctctggagaaccctaatacattatacttttttttttttttttgagacagtccctctctgttgcccaggctggagtgcagtggtgcgatctcggctcactgcaacctccgcctcccggcttcaagcaattctcctccctcagcctccaragtagctggggttacaggcacgcgccaccacgcctggctactttttgtatttttagtagagatagggtttcaccatgttgttcaggctggtctcaaactcctgacctcatgatctacccaccttggcctcccaaagtgctgggattacaggcgtgacccaccacgcccagcctacattattctttacattcaactaccccagttcaaattgctgtgtggtttctgtctcctgattggaccgtgatgaatacactattattctctcctgaactcccaatccatatgtgcagatgcttacccagcatctctatctggatgtctaaaaggtgtctcaaaagcatcgcaaatttgttatccccaaaagtagctcttgatgctcctcccacaaacttttcttttctttttttccttttttttttttgagatgaagtctcgctcttgtcccccagtctgaagtgcaatggtgcgatcttggcttactgcaacctccacctcccgggttcaagtgattctccagcctcagcctctcgagtagctgggattacaagtgtgtaccaccacgcccagctagttttttgtatttttagtagagacggggtttcaccatgttggccaggctrgtcctgaactcctgacttcaggtgatccgcctgccttggcctcccagagtgctgggattacaggcatgagccactgcgcccagccaaacttgttttcttttacagcttttccaatctcagttaaaggcaactccatttttcagtaaggccttccctagcaacccattaattgtagtcagcagccccaactatactttcaatccctcttctctgctgttattttattttttatttttatttttttgagcagattctcactctattgtccaggctggagtgcagttgcatgatctcggctcactgtagcctctgcctcccatgttcaagcaattcttctgcctcagtctccccagtagctggaattacaggcgcccaccactaaacctggctaatatttgtatttttagtagagatgaggtttcaccatgttggtcaggctggtcttgaactcctggcctcaagagatctgcctgcctcagcctcccaaactgttgggattacaggcatgagccaccacacccggccatttgctattattatttatttttttttgagacagtcttgctctgtcacccaggctggagtgcagtggcacaatcttggctcactgcaacctccgcctcccaggttcnnnnnnnnnnnnnnnnnnnnnnnnnnnnnnnnnnnnnnnnnnnnnnnnnnnnnnnnnnnnnnnnnnnnnnnnnnnnnnnnnnnnnnnnnnnnnnnnnnnnnnnnnnnnnnnnnnnnnnnnnnnnnnnnnnnnnnnnnnnnnnnnnnnnnnnnnnnnnnnnnnnnnnnnnnnnnnnnnnnnnnnnnnnnnnnnnnnnnnnnnnnnnnnnnnnnnnnnnnnnnnnnnnnnnnnnnnnnnnnnnnnnnnnnnnnnnnnnnnnnnnnnnnnnnnnnnnnnnnnnnnnnnnnnnnnnnnnnnnnnnnnnnnnnnnnnnnnnnnnnnnnnnnnnnnnnnnnnnnnnnnnnnnnnnnnnnnnnnnnnnnnnnnnnnnnnnnnnnnnnnnnnnnnnnnnnnnnnnnnnnnnnnnnnnnnnnnnnnnnnnnnnnnnnnnnnnnnnnnnnnnnnnnnnnnnnnnnnnnnnnnnnnnnnnnnnnnnnnnnnnnnnnnnnnnnnnnnnnnnnnnnnnnnnnnnnnnnnnnnnnnnnnnnnnnnnnnnnnnnnnnnnnnnnnnnnnnnnnnnnnnnnnnnnnnnnnnnnnnnnnnnnnnnnnnnnnnnnnnnnnnnnnnnnnnnnnnnnnnnnnnnnnnnnnnnnnnnnnnnnnnnnnacagagtgagactctgtctcaaaaaaaaaaaaaaaaaaaaaaaagaatttcatggtttttgttttgtttttttgagatgaagtctcactcctgtcccccacgctgtagtgcagtggcatgatctcagctactgcaacctccgcctcccgggttcaagcgattctcctgcctcagcctcccgagtagctgggattacaggcacctgtcaccacacccagctaatttttgtatttttaggagagacagggttttgccatgttggccaggctggtcttgaactcctgacctcaagtgatgcactcgccttggcctcccaaaatgctgggattacaggccttctcctttttaatgatatattttgatgaccagaaattcttaatttttatatagtcaatttttttatagcaaaacacctgtgaacatagtcaaatttatcacttatcctttataatttaaatgtcttaagaaaacttccctttcccaagttaataagtacattttgtattttctcctaaaaattatgtttcatctttcacatttaggttgctaagccaccaagaattgatttttctgtatggtgtgaggtagggttcaaattttcaccccttactcagaaggctctttttttctacataatggttttggtttgatctctctgctttctgaagtctcttatcctatgaaacactatcaagattctacaacaatgaagcaaaacaaagtatcaatcccacagttttatttgtaaagaacaaagcatgaaaagtcatatttaaatgtactcccaaacctgaaaaacccacgtcagtttgtctgatatgtatgttaaagtgcttaatatcacaatactctttcaaattttatattatgttcagatgagaaaaaaaatccagttctgatgcattttgctaacaatacaaagaaaaacaatataatttaaattcagaaaagctaattaaaaaaaagatacacaggttacatttatacatggttcaagtgtaacacagagcattctaaatgtttcacaccctcatttgattgacaacaggaactccttactatacttctctactgttgacaagatttggtgtttagaatcaagattggattcacacacaagtacattcaggtaaattagaacaaatatgattccctcctacataacccaaggataccctggatcccttcgaatgaggaaaaattttatttgaggttttttttttttcctctagcttgatgtgatrtatctctgaagtcaatctttatcttgtccttgagagggtgaacagctccaatcagattttggagakgaggttctccttagattcttttgatcacactacatcagcaacctcttcaaaaagcttagaattcagttgattcaagggatttataaatttattttaataggaataaaggacctagtagtttattatccttttctgtctcctatttatgctaaacagtaaagtaataaatacttatataagaaacagacttcaaaagacatggatgacttggaaataggattcactttataaaagtagagaagggctcaagactctcaatcagtgaaggtgtgttaatactgaaatataaatagctaaagttcagattgtcttttcaacatagtgaaaaggatacactagtttctgtaaacctcacagaaaatattcacagttccctaaatgaaaaattgtaatctttagcagaaagaagatatttcattatgaagagctacactcctaatgttgtgaaataaatatttccctggaaatttgaggtccttgtctgtcacctcatgtttcaaaataccttagggatgtcaacatatactacacataagctgttgtatagtcttgaacctctttttcacttacatttacatataacagtgctttattgccaaaaaaggaaatatgagcagttcagtatttcccccatatcattcatatagtgtgatagaagttcattaaaataattttttaaaaagccatgtgaaagtaaataccacaaggttacaaaaggtacaaaaatgtgtgaaacatttaaatttcagagggaaatccacacttctgcaaggttgaagtttctcatatcaamttctcattcccagtggaaaacaaggtggggagggttgggaggtttttgtcctcagtagcctgctttttcccacgtaggactccactttatactacttcacactgactcgcagtcatttttaaggcatatgactcccgaccagggcacagatctcacacatgcttccaacatcagtgtaatgccactgtgtcataaaggtcaagattaggggtttcatgacatatgaaaaacwttgggaaaataaatttttcaagaggtaatacttttggcaatttaattttaaaacaacttcttcaccagctattactatgcaaaaataatcattatggtcccagcatttaatttatttgcaggaaaaaaacaaattaaatattgatttttttatttactttgagatgtaatcctaaagcaatgtattaatttaaaaaattaccacagcagaaaagatgcctctatgtgggtatggtccttccaaaagtcagcttaaaagtcaagcatttattctaagcattctgctactactgttgtgctcaaacttttggtataacttagagacacttatgagccacataaaaactaagtcctttgttttgtttttttgagatggggtttccctatgttacccaggctggactcaaactcctgggttgaagtgatcctcctgccttggcttcccaagcagctgggactacaggtgtgtactgccatgcccaacatgtcttatttctttataactgcacttcttatgtgaccccaaactcagcttaagcatccttttcattgatcaaacttggatcctaaggactatttccaaatatttaaatttattcttaaaggccaagattgactgccattgggaatattcaaaagaatgggggtactggccattcaagcagctcacacaaggagggccccacatgtttatagcacaggctgtatcaacggaataagtacatgggctcacaaggtgactgaaggacccatcatccaagaggatgtgtcagttctgatgtgttttttttaaatcatcatttcaccattatagtaatattacacaaaggcatgaagatgaaacttcaggtgtaacttttttgggggtattactttttaaagtaatggttttattcataggccgcaaatccaactttgsctgcagtttttttctttttttttttttgagacggagtctcgctcttgtcacccaggttggagtgcagtggcacaatctcggctcactgcaacctccacctcctgygtttaaacgattctcctgcttcagcctcctgagtagctggaattacaggccctgccaccacccccccgctaatttttgtctattttttttttttagtagagacggggtttcaccatgttggcyagtctggtcttgaactccygactgacctcagatgaaccacccgcctcagactcccaaagtgtcaggattacaggcgttagccaccgtacctggcctgctcccagtttttacaagatgttaattcccaataatctgagagcaatgtgtkaatatgaatattaattcttctaaatgaatattcatccttatttcctacttgtataggtggatgaataaagatccaatagtataatagaaagactattagtaagaatgccggaaggtcagtctcatgcagcctggtgaaataaaacaaacaaacaaacatgaattctagagcttgtgttgtcagtaaccagctgtggggtaagtgtaagatttaatctctctattccttaagtgttcccatccacaaagtaagaaggctggatgaggtgtgtcaatcctagcacaytaacctaaktcatcccccaggttgcctagacctgtcaggagcatggccttatgaagatacaaacatgaaatcctgggttggacccctctatagtttctgatcaccaaacacagtaggagcccagtgtaaaacaggttctggatatctcccacgataaacttcccatgtccctggaagagctgtaccattgtagacacactttagcttcaggcaaacaaatttctggtgtacccagaaccattttcttaaaccatttccatgggtttttatttttatctatttattttttgagatggagtcttgctctgttgcccaggctggagggcagtggcgcgatctcagcttactgcaagctccgcctcgcgggttcacgccattctcctgcctcagcctcctgtacaggcacccgccaccacgcccggctaattttttgtatttttagtagagacggggtttcacggtgttagccaggagggtctcaatctcctgaccttgtgatccgcctgcctcggcctcccaaagtgctgggatcataggcgtgagccaccgcacccggctccatgggtttttaaatacagctgtcaactctccttttcctcaagtatgaagtcacatgttaaaagaggctgtccttggctgtgtttgataaagggagttaggcacttgtttcatctgtttcttcctccaggaaataaggttaacaacacaggtggtgaaagcccagcaacctccgattgcacaaggatactgatgccatggctttgcttttcrgccacaactgggaataaaactgggagctctgctgaggcaattttgctgctaaaaatgtacaaatgcctaattagagttacaggacctaccagaagatgaggacttacagtaactagccaatactacatttacttaacttctttataaactatcaaactggaaagttactcacaacttttgktctttcaaaattgttgccacctcttgctttgcttccattttgtcagcctgtgctgccagtggcttttagcttctctgggtcagttgttttacattattactccccttcctacaaaggaacgtaaagcttgccctgaaacacccagaaagggttcattctctctctccttctgttatttgcattatcatggtcaacaaatgctttcacaaaaacattccaagccacacacagccctcctcctccttagacattccttccatttcccgaggggggatgggccctggagaggtgggtgattagaccctaacaaagacagggctcatggttatccttaagaggtagaccactgcacagtttagatggccaaattaaaagtacagaatcaaattgctgtttgcagttcttatcactatgaatctaacactgaaattcacatcttcccaaagtacctcaaataacaagaataaaaatgccaagaatgaagttagtctaggctaatctttccgaagtgtaaagaagttataatcccacaattgaacacatttctcagagctttgtatgttctctttccagttcagccaagctcctggggtctagtgtttaaaatactccaattatatcatcttgtgcggactgaaatttttttccaaaagactggaaaagtgactagcgattcaaatatataaaacagtttgtaacttaaaagatagaagtgaagactaccagtacagtaggtaaagctgtgtgcatccacaatacaaaggatcagactccaagatggatggctactacataacaatgcattctgggtttctttgtgatacctggagaaaaaaaaaagcccgactgggttgcactatatttacatgtttactggcttcttcctggctagcaccactcttccccccaacccccaacatttttaagctacttattttaagtcacaggaatattcaatctaagaaaagcatcttattagagtaatataatttcttaaagaagatagcatatttacacacatctaacacatgaaaatactctattttatactaaattccaggttcaaatgaactacaatacaacattttgccttgtctgtagagtgaggattgttccaaatggggcatatgtttggctgcccctgcagtgactcactactgtcagacaagtccaaatcggtcccctagttggggaaggagcaaggtttggactgagagtttctagccagttgggttacacatccactcctttgatgagtgatccttctaggactatggtgaagtcctgaatggtctgcagaattcggataagggagttgacagtcatgcggtctcgcaggagagcgctctcttcatacattcgagtgatggcaggacactcagctaacaatggaatccactgtgggagcaggcgatccctacagacccaaacagaaacaattcctgagcattgctggcctcgctgcagaacaaggcacacagtggagtctgtatgaatgggaaggtgtgggacttgatggtacaaaatgtatccaagctaagaggtcaggagagaggaaatcaaagccaagaagttgaatattttctggtaaaaagacagtgatgagacagtgtaaagawagctaaagggaaaacccattattttaaacccaatttaatgtactttaagagtttaaagtacattagaaagtctatgcacattaaagacattctctattctgattttaccacctttagaaagaggcagaatgtcattttctatgtcttttttttttaataggagtgttactctgtggcaaggcatgccacagtatactgaccttttggaagaaagactacactaaactgtagggacttgcttttttttttttttttttttttaacttatataacataacagggtgaggaacaaaatcaaagcagaaaaacattaagtagattttataaaccagatgagagtttgcaatggtctaataaatcagaagagtatagagataaaaggagataaagatcatgctcaaaagaaactttaaaagcacagctaaaactgggctccttttatgaagaagaaatacagaacttagttctgtaaaccagctgtttcaggaagataaaacctcacatcttcaatgtttcctgatcaaacctgacattagtaacccattgctaagttcctaagacatccttattgagcatccccaatcaggccatcttcagtctcaagttggggctcttaaggttcaggaaaaaacaaatactacatgggtaacttaaaaaaagaaatctaaaggtctgtatgtttcatttcttacarttctgagatctgttttaaaagtaatggattgtatcgctcctatgtgccactttcaaaaaataaaggggtaggaaatagtcttaaagagaagatgatatttatatagcaagaatcccataatgttattaaatgtaaatatagtggtatatatacactatataaggtttacttagtaaatatgtacagtgtatgtgtctagttatctaacaacttccttattacctatctatctgtcgagccagtatacagtcatggtggagagcttgggctctgaagtgggacagggtgtgaacctggctctgtctcatttttctgtgtgatcttgggaaagtctgctaacttacgtgtgcctcatctattttctactttctcatctttaaaatgaaaaaatcggttgctacctcatgtagtggtggtggtgaattaaagaaacccaagggaggaggcagaggttgcagwgagccamgattatgccacggtactccagcctaggcgatggagtgagactctgtttcaaaagaaaaagtaaaaggaaagaaacccaaaggagagctctggaaggggtatgatctggtataaccttttctggactctagttcaacatgtgacaaagatagggaaaataaaaaactggttttgtaccttgttccaaggcaaactaaaatctggaatttgccatccttcccaatgttcctgggtgcagtattaatagcatttacgtagtggcagaaggttttgcaggatgatttctgaataaggacatcatcttcattatctagaatctggtcagttgtttcaaaataagcaaccactttctctgaggaaaaaagtcagaattatgtcacaatatgtgtcaacacttcatatatagaaagattcatcacttaatttattatggaaacactaacgatgctttgcatacagtcagtcctgaagccaatatcattactttatcattgattttaggggtcgatgtttcatggtagaacaataaatatgctcccaggaatttattttctaatttagactgcattccagaagactggaaagtttactccctttaaaataccttcaggaaacagaaactggcaaaaaagaaaacaaaaatagcatcttctgttaagactggaaccttctaggagtaaccagcaatgacacggtagccattgaaataataccccatgttctagttacagaatgacttgctaacactttgcaacaagatccttgaaatgtacctgaataagtacctgacaaagagagatatatgtatatacacatgagaagcagaagcaataagattctaggcattccagaagaaaaaaaaaaaatcactcctgggggcctatctctgacaactttcctttttttgtctattctaagttagatgaaataaactacttcatctaggccttatttagaaaacacaaaatgattaattgcccatttaaagaaactaggaattctagaagagctgcataccaaaagaaagatcacaaagcttagcaagctagaacagaaacactccaaaakagcttcctgtgatgatgaaaatgttctctatctacaaggtccaatttggtagccacaagtggctcctgagcacttgaaatgtggccagtgttattaagaaaatgaaatttacatttacatttgatttaaattaaatagatttggccaggcatggtggctcacgcctgtaatcccagcactttgggaggccaaggcgggcagatcacctgagttcgggagttcgagaccagcctagccagcatggtgaaaccccatctctactaaaaatacaaaaattagctgggcgtggtggcaggcacctgtaatcccagctactcaggctgaggcaggagaattgcttgaacccaggaggcagaggctgcggtgacccaagatcacaccaytgtactccagcctgggcaacagagcgagactccatctaaaacaaacaaaaaaaattaaatagatttaaattttaaatggctatatgtggctaatggttactatactggacaacacagagctagaggaatccttttacaaaaattggccaggcacagtggctcacacctgtaatcccagcaccttgggaggccaaggcaagtggatcacttgaggacggaatttgggaccagcgtggccaacatggcaaaaccccatctctactaaaaatacaaaaattaggggtgtggtggcaggtgtaatcccagctaatcagtggctggggcaggagaaccgcttgaacccaggaggcagaggttgcagtgagctgagatggggccactgcactccagcctgggcagtagagtgagtctctgtctcaaacaaacaaacaaaaacgttctatcatgtcactacttagctcaaaaccttccaacagcttccagtttcattcaggataaaggctgaaatcattccaatgacctagaaggccctacacaacctggcactggcactaaacaccccctcccccaatctcctactttctctctcttgctgtgctccagtcacactgggcttggagttccatggaaacacttccgccttggggcttagcactggcagtgctgtcaacctggagtccctcctcccagatatctacatggctcacttcctcacctacatgaagtctgtgctccaatgtaccttgacattcagcagaatctaaaaccaccccatttgaaagaccactccccactttatttccttttatactgctctatttctttccagatcaatggtcacatttctgacataccatatgaattacatatttgttatgtttttgtgtattgtttgtttcccacaccgacctgagtataagtttgtcaaccataggatttctgttttgtttactaatgtatatcttgagcaactcaaatactatttggaatattgtgcatattacaatttgttgagtaaatgaaaaacaaagacaatacttgatatttatttatcattattatatacactttttgagacacggtctcactctgtcgcccaggctggagtgcagtagcttgatcatggctgactgcagccttcacctcctaggctcctgggctcaagcgattctcttgcctcagcctcccaggtagctgggaccacaggtatgtgctaccacacccagctaatttaatatttattttaaaatatatatatccttgccgggcacgayggctcactcctgtaatcccagcactttgggaggctgaggcgggtggatcacaaggtcaggagttcaagaccagcctggccaatatggtgaaaccccttctctattaaaaatacaaaaattagttgggcatggtggtgcacacctgtagtcccagctgcttgggaggctgaggcaggagaatcatttgaacctgggaggcggaggttacagtgagccaagaccgcaccactgcactccagcttgggcaacagagtaagattccgtctcaaaaaaaaaaaaagaaaaaaaatatatatayccttatcactaacccttattcactcagattcctgggtctttgagttcctaagaaaggcttcagtgaccttaatgtaatacacatctactttatttacctatgaagtcccagatgaagacattcttgtgaaagatgcgggcagatttgaacccatggtggaaaacttgctcaagggctgcaaccaggccattttctccacacagcaacacggtgaggcttcctctctgtggggcataacacacagtgccaaagaaaaatctcctgcatctatgtctaaraaaaacactagagaagcaagtgctgaaggtagctatatgaagcatgtttttacagctaccagaaagcttacaaatgaaaattcaagcaccccatattgcctcgtgtatcacatataaaagcatctttaaaagtcccactatactaagttttatagcccataaatacctctttttcaggtttatgaaaatgtttcacaatattgttcacagcttctccaattccttcttgtatctgcccagcattgggttctgtaaaataataaacagtggctgcattctcatgggagagaaataaaccaargtactatgggacatcaactgtgtccacctaggcaggaaatacgtcatcagagcaggctggctttgccaggggctccatagaacttgcctctggcctgtttggccaagtgggaagcatcctggcaaaatggaaaataatccaagcgatccctagattcaaatcccagcattaccatctgcaatctataaccctagcctagtgtctaacttcctctgagctttcagtttcctcaactgaaaataggaaaaatacaygcctcactgggaaaactggtaagttataggagtaaataactagcatggcgcctgtcacaaaatgctagcaagcccccaaatatgagaagcaaggttgagaagtcccaacatcactcctcaaatgttcccttatgctacccacctacgagcctgttagtgaaatgttcccttatgctatctacctacgagcctgttagtggaatgttcccttatgctacctacctacaagcctgtcagtgggcatagattaaggcttcaggcgctctggatagttaacctggagtttgaagatttgctgttgtgtttaaaataaggggaagatgccaggtaccctgtggcatctgggcctgaagcccagaactccctcccttcctggctagtcaatctgtctcagcactgcttccttctgccagccagtacttgctcttctaggccactttcctgagggacaggttggtgggctgcttgaatgcgacctaaatcacttttgtccaccaaacccaaggaatggtttgtttttttaaaaaggtggtaaacatttcagaagtaggtaacaacagaaaaggtatatagttcagattttcttgtagttctaatttacttaacacactataaaggaaaacccatacatcctcatgtttaagaatctctgaattcatactgctcaaggatttcttgcatgaacatttcttttttcttttttgagatggagtctcgctctgtctcctaggctggagtgcagtggtgcaatgtcrgctcactgcaccctccgcctcccaggttcaagcaattctcctgcctcagcctcccgtgtagctgggactacaggtgccggccaccatgcatggctaattyttttgtatttttagtagaaatagggttttaccatattggtcacgctggtctcgaactcctgacctcaggtgatccgcccacctcagcctcccaaagtgctgggattacaggcrtaagccaccatgcccggctaacgtttctttcagtaaaattcaagtaggttttttctacactaatgcataaaaattgttaaaatgaaaacctcttataattgaagtactgataccatggcctcttgttcctagtggtttctttacccagtagtttttgtttgttttttttacctttacctttctctattttttcttttagacatgaagtctattttgaaaactgtcacccattccaaaagagctttgatcagtattattataaaactgattttaaaaattttcagttctctgaataccattttacatataacatactgtgagaaaatacygttatccatttctgagtcttgggtcatttagacttttctgyttatagcatgagaaaagaaagtacgattaaaaaaaaatgggggataaaagcctctcagataatacccccatgaaattggactgactcagatgttataataattaggatggattgagctgaaacctacttttaaattttaaatcagcataattaaaattcaccatgtaataaaagtcaccaattttgatgagctttgacaaatggatagtcatgtaaccaccaccacaatcatgatacagaacatttccatcatccccaaaagttaccctgtgmtctttttttttttttttttgagacggagtctcgctctgtcrcccaggctggagtgcagtggagcgatctcaggtcactgcaagttccgcctcccgggttcacgccattctcctgcctcagcctcccragtagctgggactattgacacctgccaccatgcccggctaattttttgtatttttagtagagacggggtttcaccatgttagccaggatggtctcgatctgctgaccttgtgatccgcccgtcttggcctcccaaagtgctgtattacaggcgtgagccaccgtgcccggcctatcctgtgctcttttcagttaccttccttagctcctaactcctggcaaccaatgatctactttctattattatattgcttttatagagatctgatatataaacagatatatatcactatctgtttatcctttcaccagttgatgtatattggggttgtttccatttttggctattatgaataaatctctcaaaayatctgggtacaagtctgtgtagatatatgtattcatttcttttgtgtacatatctaggagtaagattgctgggccaagcgtacggtaagtgtgcatgtatctttataaatgccaagatgttattttgtattcctactagcaatgcatgagctttctgttactccacatcctcaccaatatttgttgctataagtgctttaaattggttgggcacagtggctcacgcctgcaatcccagcactctgggaggtcaaggtgggaggatcacctgaggtcaggagttcaacaccagcctggccaacatggtgaaaccccgtctctacccaaaatacaaaattagcctcacgtggcagtgcatgcccgtaatcccagctatttgggaggctgaggcaggagaatcgcttgaacctgggaagcggaggttgcagtgagatgagaccgcaccactgcactccagcatggccaacaagagcgaaaactcagtcaaaacaaaacaaaacaaaacaaaaaaacaaaaaaactgcactcatagttaatacacaatcatgtgctagcaaatggatagagactaatagaagaatctagggaaactgctttgttaataaactaaggacctattaggtacctttgttattctacttgtggttataatctatagataaaaagccccttcactgataaacttctgtratttttccctaaataccgcctctatattcatgttctgtggctgccttctgtggctgctgtaatagactcacaaaacttggtggcttgagtgacagaaatacattttgttgcaggccagaagtcaaaatttagttatcactgggccaaaaaaaaaaaaaaaaaaaaagcaaggtgtcagcagggctgtattcccttgaaattctaggggaaaatcccttccttgcctcttttagcttctggtggctgttggcattccygttttttttttttttttttttttttgagacggagtctcactctgtygcccaggctgtagtgcatgtagtgcagtggcacgatattggcttactgcaacctccacctctcaggttcaagcaattctcctgyctcagcctcccaagtagctaggattacaggtgcacactaccatgcccagctaatttttgtatttttagtagagacggggtttcgccatgttggtcaggctggtcttgaactcctgacctcaggtgatccacccacctcagcataatgcctggccagcatttgttgttgttgttgttgytkttktttttttttttaaagacagagtcatgcttgtttyggcagcacatatactaaaaaactggaacaatacagagaagattattagcatggcccctgcacgaggatggcaagcaaattggtgaagcattccatatttttctcaatacttgaatgtggaacatatgcacaggggaaggaaataacattgcactttataaacactgtattgtaagtggaaaatgcaatgttttaaataaaactatttaaaattggcaccaaaaacccccccaaaaaagacagagtgtcactctgtcactcaagctggaatacagtggcatgagctcggctcactgcaacctcacctctacctcctgggttcaagcaatcctcatgcctcagcctcctgaggagctgggattacaggcatgcaccacatgcctggttaatttttgtttttttagtagagacggggttttgctatgttggccaggttggcctcaaactcctgatctcaagtgatctgcccacttcggcctcccaaagtgttgggaaagaatacatatgatkgcatttagggtccacgtagatgtgatccaggacaatctcctatttcaagatccctatcacatctgcaaaaatcctttttccaaataaggcaatatttacagattctagaggttagaattttatatttttgggagacaytatttagtctattaaagcctacattagtaatttagtctattaaagcctacattagtataaattagaagtttactatattactaaaaatgacacatgaacatagtataatattcataaaattcactcctttatagtattttgtttcatccttactataggaagaaagttgggacagaaggggtagaaggaaatttkaatctcttagaataagagacactggggcgggcgtggtggctcatgcctctaatcccagcactttcagaagctaaggcgggtggatctcaaggtcaagagattgagaccagcctggccaacatggggaaaccttgtctctaccaaaaatataaaaaattagccagatgtggtggcgggcacctgtaatcccagctacttgggaggctgaggcaggagaatcgtttgaacccgggaggcgggggttgcagtgagctgagatcgcaccactgcactccagcctgggtgacagagtgagattccatctcacaaaaaaaaaaaaaaaaaaaaaaaaaaaggctagatatggctatctgggagtactgtaatatataactattattatttctcttttaagtttcaggcaaggccaggtctggtggcacacrcctgtaatgccagcactttgggaggctgaggcaggcagatcgcttgagctcagaagttcaagaccagcctgggcaacatggcgaaaggcagtctataaaaaatacaaaaattagccaggtgtgatgttgtgtgcctgtagtcccagctacttggaaagctgaggtgggaggatcatttgaacccgggaagcagaggctgcagtgagctgagactgtgccactgcattctagcctgggtaacagagtgaaaccttgtctcaaaaaataaaagtttcaggtaaaatatttactcatatttccacagcttaataaaaacagagcatgcaagttttttaaaaaattagattttaacatctaaactcttccggcttttgaatatttatgaattttcctcaactttcttctttttaaaatctcctcactacattcattaacacaactgttttctatcaaatggtcacatgaagcctacatcataggagcacataagaaaaatttaaataaatttactgttgttttttcctgtcagtgaagtgatgctcaatctcctagccgtggtgggtgacttctgctggggtggagtccgacactgctttactagatcttcatctgatgctgatgtcatcaactctccaataagaattctctccaggctcccatcatcaatgcctttccccagccaccgcccacatgggaatctggtaggacagaaaacaagttttttattttttatttttttgagacagggttcycgctcagccccctgagtagttgagactacaggtgtgcaccaccacacctggctaatttttgtgttttttatagagaggtctcattacattgcccaggctggtcttgaactcttggcctcaagtgatccccccatctcagtctctcaaagtgtgtggattacaggtgtgagccactgcacccggtcagaatattttcaaactagaaattaatttgggagttcaggcacagaagaaaagaggacaatgtttccatagagtagtgttggctgtgactagtggaatccaagagatcttttcctcccactgaaattattttaggcttcttttttattttcttttttttctgagagttatattaatctttccaacacttgtggactaagcaatagcagcaaacatctgttgttttaaaaagttttttgaggctgggcatggtggctcatgcctgtaatcccagcactttgggaggccaaggtgggtggaacacttgaggttaggagtttgagaccagcctggccaacatagcaaaaccccatctctactaaaaatacagaaattagccgggcgtggtggcaggtacctgtaatcccagctactcgggaggctgaagcacgagaactgcttgaacctgggaggcagaggttgcagtgagccgagattgcgccattgcactccagcctgggcaacaagagtgaaactctgtctcagaccaaaaaaaaaaaaaaaaaaaagagagaaagaaaaaaaaaagttttttggggggcaattttgtatgacataaacaaaaaaaaaattgcccccctcacctggaaaaaaaaaccctaaaattcagaaggcagtggaagagttcaaacaattctttttttttttttttttttttgagatggagtttcaccttgttgcccaggctggagtgcaacggtgcaatctcggttcactgaaatctccccctcccgggttcaagcgattctcctgcctcagcctcccaagtagctgggattacaagcgtacaccaccatgccctgctaatttttttttatttagtagagatggggtttcaccatgttggtcaggctggtctcaaactcctgacctcargtgatccmcccgccttggcctctcaaagtgctgggattataggtgtgagccactgtgcctggcctacaattcttaaaccttttcttacctgaagagtcttaaaacaaagaattctgagttcccaaggccatttacttacctgtatgtatgtcctgtgatttcatttctgaccatgacacaatccactagccatttggctaacagtcctgagttatcgtgaccaatctgaacagtggtcagcttccccaagttctggcactgtagggacaggaccttaggttatttagtacccaatcccatcctgttacatctcagctttacaggtactttggttccgtctaatttaacaactgcagagacaaaccctgcataatgtattcagctatgcactagagaaatatattcacatatattccttgctctcagggagctcccacataatgagataggagacatatggacattaactaccaaatgaggggcactgcacacagtgctagattagagatgtaaaaagtgctagaagaacgctggggaaggaacagttacttctacttggggaacccacaaacaacacagacagtgacttrtgccttgaagggtaagaataatttctaaaaacaggaaaaagatgctatttagattttgttacaaagaggtcaagaaaacaattatagattttaaaaatcactgacactgatattcttttcttttttagaaaattttttgtgggtacacagtaggtatatatatttatagggtacatgagatgttgatatttttctgttccaataagatactaaggcagaactgacctcagacctcatatactagaagtctttgaagctattttttaaaaggcatagttatcaataagttatcttcactggtcctttgtggacaagtacaaaataaagcaatgataataggaatagcaaaaatgaatactaattaaattctgacttctaaaatctgataatgaaaagatcactgaccccaacwatgtgctggatgacaacatcagaattgtaagttcttttttttggttaattttaatttttaatttttatgggtacctagtagatgtgtatatttatggattaattgagatattttgatataggcatgcaatgcctaataactgtatcagggtaaatggggtgtctgtcacctcaaacatttatcatttgtgtgacaatccaattatacttttagttattttaaaatgtacagttaaattattgttgactatagtcaccctgctgtgctagcaaatactaggtcttattcactctatttttttgtacccattagagctacgagttttttttttttgtttttttttttagacagagtttcgctctcgttgcccaggctggagtgcaatggtgcaatctccgctcaccacaacctccgcctcccggattcaagcgattctcctgcctcagcctcccgagaagctgggattacaggcatgtgccaccatgcccggctaatttttgtgtttttagtagagasggggtttcttcattttggtcaggctggcctcagactcccgacctcaggtgatccgcctgcctcggcctcccaaagtgctgggattacaggygtgagccactggcccggccagagctrcgagttcttaaagcactttattctttgtatctcagtgagaaggcatcaccatgctctaacttagggatgatggcatcttgaattagttgtgcagcagagatggaaagaagtaggtagacatgagagagacagcttagaaatggcaatgatgggggttttaatgtactttcattattgttagatgaagaaaagccaagggttttaatattttatatacaggtggctttgagtctactgcatggataaggccaaactgggctcctgggggcgggagggcatcatgactctaagtggaaactgctatttcgagaccccaaggaacatgagaatgggacattcagttcgtaccatttccttcctcaaacacaacaattatttgtcctcttcctccaccaagatcaacctgtgtacaggcttaaccccatggaactatttcaccaagtaagactgaaaattgactacaatattaaaaggtggctgtttgttttgttttgttttttgagacacagtctcactctgtcacccaggctggagtgcagtggcacaatcctggctcactgcaacctctgtctcctgggctcaagtgacctcagccttgcaagtacccagactacaggtgcatgccaccatgcccagctaatttttgtattttttgtagagatggagtctcaccatgttgcccaggctggtcgtctcaaactcctgggctcaagcaatctgctcaccttggtctcccaaagtgttgagattataggcatgagtcactgcgcctggccaaaaggcatttttatagaatcattctataaatgtcaccatgtggtctaaaaccagtaagcagatgcttgaacccaggaggtggaggttgcaacgagtgaagatcacaccactgcacagcctgggcgaaagagcaagattccgtctcaaaaaaaaaaaaaaaaaaatccataagcatgaatatcagctctcctgtccttttgccaaaggatgaccaggtttgggcagaaaacattttacagtagggaggagaaccaccgcggggaaaacatttatttgaatatttcctgcttgctagaatctgtgctagaccctgaaaatagtaggagaagacctagaaagccccaaagcacatcattacaagtgaaaaatagagcttaacaatgaaaatgcaaaacaaattagtatataagctgcttaagacaactttagacatataatcacaaaaatgatcctgcacgctttgagtgttcctctattttatttgattcaaggaaaaatgaaaaagccagacagaatcatctgtaaaactacacgtgatacattcttctaggaaaggtattagctgaacctacctcaaaggtcatttcgaggaggtttttgggaatctgcattactcctgtgtctcccagctctcctgatacacagatccaagggtttgatgtgattattgcattgctcagctttttgattgggatgatcactgacctatacggaatcactgaaagaaaaatgcagaaattaattaaaaagcgggaataaaattctccttataacaaaacatatattaagaactcttgttggttttcattgataatttgctttttatgakctatcaagatgtacttatacgaaaagttgagatcataacctttcagtctagaaagatgagatctagtttgcaaaccagaagtctcaatactcgtagcagtggttttcacagcatgtatatcatcatgtatgtatgatgcatatatcaayattaaacgtatgaacaatctcaagcattagcacgagaatacctaaagatgtgaacactgactgtgtatattgtgttttcattgcttaaattttcttaaaaattaattttgtaacaaaattgaatagaaatgaacatgattactgatatggttttatataaaaagaggggtggatgacttcttggacagtattgagtttcttgggcaatgctttaaagcactgcatttcagaactttcctgtcccaagtttacagaacaatatgcaaaaaccacaaataataaacaatggmacctccactctggacatatcgtgaagtctataaaccacaactttgaaagctattaaggtgactcacacgcaagaggagcccagggaggctcttccacagacagaccactagatgtcactgccctatcactgtcctttgctcaaatgtggaagcacgagaggttagatgttatgcatgtcctcccttctttttttttyttttttttttttgccaacatggcaaaaccccgtctctactaacagtacaaaaattagccgggtgtggtggcaggcgcctgaaatcccagctacttgggaagctcaggcaggagaatcacttgaacccgggaggcagaggttgcagtgagctgagattgcaccactgcattccagcctgggcaacagagtgagactctgcctcagaaaaaaaaaaraaaagaaaaaagaaaacggctggatgtggtggcctgtaatcctagcactttgggaggccgaggtgggtggatcacaaggtcaggagcttgagaccaggctgaccaacacggtgaaaccccgtctctactaaaaatacaaaaattagccaggtgtggtggcacacacctgtaatcccagctactcaggaggctgaggcaggagaatcgcttgaacccgggaggcagaggttgcagcgagccgagattgtgccattgcactccagcctgggcaacaggagtgaaactccatctccaaaaaaaaaaaaaaaaaaaaaaaaaaagtgcagacagggccaggcacgggggctcatgtctgtaatcctacctagcaccttggaaggctgaggtgggcagatcacttgcgctcaggagttcaygaccagcctgggcaacaaagtgagaccttgtctctatacaaaataaaaaacataattagccaggtctggtggtacacacttgtagtcccagctactcaggaggatgaggaggggggatcccttgagccagggaggtcaaggatgcagtgaactctgatcccaccactgcactccagcctgggcaacacagcgagaccctatctcaaaacaaaaagggggcagatggtttaagcacataagcatttttgtccatcacagccatacatttctggttttttgtttgttggttttctagagacaggatgtagctctgtcgcccagtctgaagtgcagcagcccaatcagtgttcactgcagccctgatctctggggctcaagcaatcctcccatctcagcctccccagcagttgggactacaggtgcacgctaccacacctggctaactttatttatttagagtttcactcttgtcgctcaggctggagtgtagtggcacattcttggctcactgcaacctctgcctcctggattcaagtgattctccagcctcggcctcccaagtagctgrgattacaggcgtctgccacctcgcccagctaatttttgtacttttagtagagaaggggttttgacatattggccaggctggtctcgaactcctgaactcaggtgatccaccggcctcaacctcccaaagtgttgggattccaggcataagccaccgcgtccgacctctagcttttttttttttttttttgagacagagttttgctcttgtggcccaggctgragtgcaatggcatgatctcggctcactgcaacctctgcctcccgggctcaagcgattctcctgcctcagcctcctgagtagctgggattacaactgcacaccaccacggccagctattttttgtatttttagtagagatgsggtttcaccatgttgaccaggatggtctcgaactcctgacctcaggtgatctgctcacctcggcmtcccaaagtgctgggattacaggcatgagccaccgtgcccggcccctagctaactttttaattgttcttttgttgagacagsatgtcactattttgcccaggctagtcttgaactggactcaagcgatctttttgccttggcctctcaaagtgctggaactccaggcatgagccactgcacctggcctgattgtaaaattttaaagttttttttttttgagacacggtctcgctctgtcacccagggtagagtgcagtggcacgatctcaagcttactgcaatctccacctcctgggctcaagtgatcctcccacctcggcctccccagtagctgggaccagaggtgtgcaccactacgcccagctatttttttgtagttttagtagaggcagggttttgccatgttgcccaggctggtctcaaactcctaagctcaagagatctgcctgccttggcctcccaaagtgttaagactaccggcatgagccacctgccatgtatgtatgtatgtatgtatgtatgtatgtatgtatgtatgtadgtatttttgaggcagagtttcactctatctcccaggctggagtgcagtggtgcaatctcagctcactgcaacctctgccgcccgggttcaagtgattctcctgccttagcctcccaagtagttgggattacgggggcttgccaccgtgcccrgctaatttttgtacttttagcagagacggggttttatcatcttggccaggctggtcttgaactcctgaccacgtgattcacccaccaaggcctcccaaagtgctgggattacaggtgtgagccatcgcacctggccactatttatttattttttgagaagaagtcttgttctgatgcccaggctcgagtgcagtggggcgatttcagctcactgcaacctccgcctcccgggttcaagcgattctcctacctcagtctctggagtagctgggattacaggtgtgcgcccaccatgcccagctaatttttgtacttttagtagagacagggtttccccatgttggccaggctggtcttgacctcctgacctcaggtgatccgccacctcggcctccaaaagtgctaggattacaggtgtgagccaccatgcccagccatttttttttttaagtagggtagaatcaatatttgttgttatccttgggatttctgcccatttgatcataagagggggtgttagaagccctccgtgaaagatctacaagtaggatgaaaaacatttactaaagaaggtgcctagatatagcctcacaatatgagctcatggttcagtgcactcttagatgaggaaaacaaatgagataaatggttcatttccctaattttacataaaagactttctttatgttaggtgaagagtctccctttgtgtccttttattttggctttaggataggaaaatgtcagagaaaaggccatatattcacggtttagtaatcatcagaatcaaatgggttttgaaactgaaagcagaagaggttagtgttaagactttattttaggtgccagaggcttttctcatttcttgcactgctaagaaaatctgcagaaaaaggcatgtttagggtcagcagttctgtggctgcaaaaggcccacagatgcacaacagtgatttcatagtttaagtatgaaaaagcaatatgattaaatttaaaaatttctttcatgaagaattcctcaaattgaaagagttactcagatgaagagaaatctacagatataaggaggattttaggaatcctctactgctactacttcttayttatttagagacagtctcaacctgtcacccaggctggagggcagtggtgtgatcttggctcactgcaacctctgcctcccgggttcaagtgattctcccacatcagcctcctgagtagstgggactaaagcaagcgccaccacgtccggctaatttttgtattttttggtagagatgaggtttcaccatgttggccacgtcagtctcgaactcctgacctcatgtgatccacccgccttggcctcccaaggtgctggcattacaggtgtgagccactgtgcctggcctcttcgatttaattaaattaattaattwattwatttatttatttattttgagacggagtctcgctctgtcgcccaggctggagtgcagtggcgcaatctcggctgactgcaacctccgcctcccgggttcaagcaattctcctacctcagcctcctgagtagctgggattacaggcgcccaccaccacacccagctaatttttgtatttttagtagagacggggtttcaccatgttggtcaggctggtctctaacccctgcccttgtgatccaactgccttggcctcccaaagcgctgggattacaggcttgagccaccgcgcccggcccaattttaaaactgtatataactttttagtttcttacacctgcagtaacctaatcaacgaatagtaacttgacaggcattacaggatggcctaatccccattccaattcccttttcctttgtcttccgttaccagagactggaaagccaaaacctacacaattctggccagtgaaatgttagtgatatttattgagattttttggaaaattatgtctttctagcacagatcctgcccctccttggcactctctccttcctgctggaaggtatgctgagaacagccatgttgaaaccatgaggtaactagcacacacagagcatgtctaacaggaaaaagacaatgagcctgggtccgtgacagcactgcccactgcctactttgagacctttattatgtaagtgaaattactatgctgtaaaccactggttttcaagtttctgatacttgcagctaaatgcaattcctaattgatacaagtaaaaattctccaaagtaaggaagaggacccactgcaaataagaattagcaatgaaggaaagaataaatgctatcattcggctttctataaaaaatacatctcttggacaggctcagtggctcacacctgtaatcctagcacattgggaggttgaggcggatggatcacctgaggtcaggagtttgagaccagcctggccaacatggtgaaaccctgtctccactaaaaacacaaaaattagccgggcatggtgacatatgcctatatacagatgtgtgatttgggaggctaaggcaggagaatcgcttgattcccaggggayggaggttgcagtgagctgagattccaccactgcactccagcctaggtgacagagccagacaccatctcaaaaaaaccaaaaacaataacaacaacaaaaacaacaaaatctccaggtccagcgtggtggctcatgcctgtaatcccagcactttgggaggctgaggcaggtgggtyacttgaggtcaggagttcgagaccagcctggccaacatggtgaaaccccatctctactaaaaatacaaaaattagccgggtgtggtggggcgtgcctgtaattccagctactcaggaggctgaggcacaagaattccttgaacccaggaggtggaggctgcggtgagctgagatcgtgccactgcactccagcctgggtgatggagtgagactctatcaaaaaaaaaaaaaaaaaaaaaaaaaattctccaatcagcatttccttccaaagttgaatgatgtccaattgcataagtttattattaacacacagatactttgattttatgtgttttcgttaagatattgaaatatttacttaataaaacattccttttctcatctattgtaggtaacatttcctatcaaagactgggtttcttgggaagaaatctctgagtcagaaattagcatggacaatgctgctcctgggaccaacatgtgagaaggaaagcaggattggttaagcaagatgttaagcttcgatgcagtctcaatgaaatcctcatctatctaacccccatggtgagctccgggacagccctttgttcagtcatgggatgctggctggaactgacagaaggtatcatctccagtgaggtacttttcttcagtaaggcgttctctaaagcctgacagccaagggtttcctgtagcactcttagcatttggggaatatcctttactcctaaacagagacctgggcgtatgtcacaatgtcacatgtactatggcatatcttgctttaaaaaatataaatgcttttattgcattggtcacctcagtaacccttaacggtcaattctctagacttactgatagtggtgaacacactggtgaagcagaaatagtccacagcattgagagaaagaaggtggtaaagaaactgctctctttcttcttcgcaacgtagaaaagcatatcgcttataaagcttcctaggaaagggtaagacaagcacaagacagtagtatcaaagaaaaaaaaaaaaaaccaagacagtagtatcatgtacttttcattatgkcttttttttttttttttttttttaaacagagtttctctcttgttgcccaggctggagtgcaatggtgcaatctcagctcactgcaaactctgcctcctgggttcaagtgattctcctgcctcagcctcatgagtagctgggattacaggcatgtgccaccacgccaggctaatttttgtatttttagtagggatggggtttcaccatgttggccaggctggtctcgaactcctgacctcaggtgatccatctgcctcggcctcccaaagtgctgggattacaggcatgagccaccatgcccggccattttttttcttttgtttctttcccattatgtcttttttccaggatggggtctcgctatattgcccaggctggtcttgaactcttggactcaagaaatcctcctgcctcagtctcccaaaatgttgggattataggcatgagccactggggctggccctcattaagccttgactaaaaataaatagctcctcttagacaaacacctttaatcttgaaaaaatagattcattctatttcaattcataaaaatggatatataaacagttaataaaacacttttaacctaataattaaggaaaaaatgcatctattttatctatcaaactaataaagacttaaaagtgatgaccagtgttgacraggaagaaatgaatgccattctcacagttggtgagactgaaaatttcaggaaagcaattcaggtaacaattactttaaaccaatcataccccttgactcatcaattttacttttaggattcagtcctaaagaaacagatgaaatggggcaaagatttcattaaacacttacatttaagcactttcccaagtgttttataggtattartacatttaattctcactctatgaggtaagtctattagtgcctttttattatttatttatttatttatttttcttgagatgaggtctcgttctataacccaggttgctggagtgcagcgatgcagtaacagctcgctgcagccttgacctcctgggcttgagtgtgcctcccacctcagcctcccaagctgctgggaccacaggtgcacgctaccacactcaactaattttttatttttagtagagatggggtctcactatattgcccaggctggtcttgaactcccaggctcaagcaatcctcccactttggcctctcaaagtgctgggattacaggagtgagccaccacacccagcctagtgtcattttacagatggggaaaagagagatacaggaaagttaaatattttgtccgaggtcattcaaacactaactagagaaggcaatatttgaacacaagcattcagacttcagattttaaactcttctgatacggtgaaatgtttatggtacactgttaagctaawaaaaaggatgatattgaatcgcacatatagtgtatcttaataagagaacatgcatagaagaaaagtacagaagaaaatgtgaaatacttagtgttctttatatagcaggattgtaagtgattatcattttcctctttgtactttggccactatgagcataaatcactttttttttttttttgagacagtttygctcttattgcccaggctagagtgcaatggcacgatcttggctcaccgcaacctctcgtctcccaggctcaagcgattctcctgcctcagcctccaagtagctgggattacaggcatgtgccaccacgcctggctaattttgtatttttagtagagatggggtttctctacgttggtcaggctagtctcgaactcctgatctctggtgatccacccgcctcggcctcccaaactgtaggattacagccatgagccaacacgcccggcctttttttttttttttttttttttgagacagagtctcgctttgttaccaggctggatggagtgcagtggcgcgatctcggctcactgcaacttccgcctcctgggttcaagtgattctcctgcctctgcctcccaagtagctgggattataggcatgcgccacgacacccagctaatttttgtatttttagtagagacggggtttcaccatgttagccaggatggtctcgatctcctgacctcatgatctgcctgcctcggcctcccaaagtgctgggattacaggtgtgagccactgcgcccagccaataactttttgtaattggaaaaaaaaaccacgccagttttaagaaaacaaggtcagattcacaggctatatgcaacacttcatgctttatcaaacctactgtttggacattaaaactcatctgaaaatgctccagggggtatgtaatccaagtgtgatatatacaaatacaaaactacaaaaagcactggaactctaataggctatcttgtttgaggtctttgttgaattctctgcctaactttgctccttagaagtcaaagtccttagccttcaaattagcactaatgtaaatataagggcaatatatttcatccaagacagcttcttttttttgtttttgttttttgagacagggtctcgctctgttgcccaagctggagtgcagtggcccaatactggctcaaatgattctcctgattcagcctccaagtagctgggattacaggtgcctgccaccatgcccggttaatttttttattttttgtagagacagggttgtgccatgttggccaggctggtctcgaactcctgacctcaagtgatctgcccaccttggcctcccaaagtgttgggattacaggygtgagccactgcacctgacctcgaagagggtttcttgatagagtaaacagaagaaattaaaagttaacaattaattgacatgtacttgactggtttcccrgctctaaaccagtggttcccaacctttttggcgccagggacctgtttcatggaagataatgttcccatggctgtcgcaggggctggggagggggaggtggattcagaataaaattgttgcacctcatatcatcagtcattagagtctcataaggagcacataacctagatccctcacatgcgcagttcacaatagggtttatgctcctttgagaatctaatgctgctgatctgacaggaggcggagcttaggcggtaatgcttgcttgccctcggctcatctcctgctgtgcagccctggttcctaacagaccacagaccagtactggtccatggcccaagggctgggaacccttgccctaaactagtgaatgcaaggctctcagaagaagccctttactgggacctcctcacagaactttattatttctttctttttttactccaggttttatctgtatacaacctgtatacaggttttacaatataaggtttatacaaaataatataaggtttatataaattcatccgatcttttggatgttactgtcagcttgtgtgaactagccagctttttgcctgattctggcagagcaatccggccttttttttttgagatggtcttgcactgtcgcccagactggagcgcagtgacatgatctcagctcactgcaacctccacctcccaagttcaagtgattctcctgcctcagcctcctgaatagccatgactacaggtgtgyggcaccatgccctgctaacttattttttgtagagacggggtttcaccatgttacccaggctggtcttgaattcctggactcaagtgatcctcccaccttggcctcccaaaatgttaggattacaggcaatggccaccatgcccaactgcaatctggcctttggctgttaaatttggtgtgtccccccaaaacgatcaagtattacatcaaaacagttttcaaagcacacgcctgttagataaagaagaatgcatgtgcacaggatacagcacttcatactgaagaagccagtttgtcagtttatgcaacttgttttgtatgcacatggattatagaaacagaaatgtatcaaagatggtatcttacttggtgagtggttggttagaaagcaactgcttaagatgctgggacaagagcttcttttctagagacagtcttatccacgcccgagctcgtccaacatcagtcttgatctcactcatgttttgaatatgcctaaagaatagtggcaacagcaaagatgtagattttaaggataaccctgactagaaaagaagtaaagagtgaacagtactgggcacagaaaggtttatacttaaagggagcaatggataatatacaattgatgttgattaaatctttgaaggttccatctgaatcatgaagttagtctcacatcataattgccattacaacacaagcacacggacaatgtggtaagataaagcatttaacacttattcactctttcaggctttattatgtccttgtggcagactcatagatatctgtaaataagaatttggttattcctgatgctccaaaaaaaktaatgaaacagggtgaatactcaagtttcttttcaaaataactgttctatagcataattaaatatcagtcacaactttaatccactgaattacttttcaagttgcactggacaacatatggaaaatatgaaatcttactttctatggcattagagaaaataagccagactgcattgataatctttaattgtttaattattttaaatattttaaaatacagggtcttgctatgttgcccaggctggtctcaatctcttggtctcaaatgatcctcttccctcagcctcccaaagtgcatgacccactgcacttggatcttatgacactgctttaaacccatacattgtaagagttgactaagtattgtacctaaaatatttaaaagataaaagcctctgccttcctcattcaataaatctgtgttagatatcttgaagtcttctaaagatttcttaacagtaattccaagtgatgattctcagatatgtatttgcttcaaactaaatctacctgattgcaattgttctgccacatatcctgccattatttgcagaatttttcttctgtaccttcttcggtgggcagaggtgtttaagggagttttaaaaactgaacaaaagaagctataaaatagtttaggacgggcacaatggctcacgtctgtaatcccagccctttgggaggccgaggcgggagaatcacttgagcccaggagtttgaggccagcctgggcaatttaagaccccatctcggccgggcacagtggctcrcgcctgtaatcccagcactttggacggctgaggcaggtggatcatgaggtcagatcgagaccatcctggctaacatggtaaaaccctgtcgctactaaaaatacaaaaaattcgccaggaatggtggcgcatgcctgtgctactcaggaggctgaggcagaagaattgcttgaacccgggagacagaggttgcagtgagctgagatcacgacactgcactccagcctgggcaacagaatgagacgccatctcaaaaaaaaaaaaaaaagcccctgtctctactaaaaatcaaaaaaattagctgggtrtggtggcaggtgcctgtaattctagcgacttgggaggctgaggcagaaggattgcttgagcctgggaagttgaggctgcagggagtgrtgattgyaccaccgaattccagcctgggtgacaaagcaagaccctgtcgcaaaagtaaaataaaataaaaaaatttagagatgctttaaaactcttctcagctgcatcttccatttggatttaatgtcaggaaacactacaatggtataaaaataagataaatgaaatcataaaaaatgctttcttcagaatacataagccaaaaataaacacagccataatyatttgagcaatttagttaaaagccacaaaatacttcaaagttatcaccacatgctaacacatgtattaataacaaatacctcatgtcctgaataagagagaccctgagcgttggcaacataactcctgagtcagattttcttctttctggtccgagggcaactatgtagaaaaatatcaacaaaatattagaaaagtaataaaaaatatacatggttcatattaaatactttgaaactgcttcgataagaacaaattttaacaatatatatcatctagcccaaaatgtcaaaaaacaaattttaaagaaaatagggtcttgctctgtcactgagcttggagtgcagtttgcagtggcatgatcgtggctcactgcagcctcaacctcctgggctcaagcgatcctcccaacttagccctgtccagagtaactgggattacaggtgtgcaccaccacacatggctcatttttaaaattttttgtagagacggggtctccctatgttgcccaggctgggctatattattaacacagtaaatcagctattttcttttcttttttttttgagatggagtttcgctcttgttstctaggctggagtgcaatggcacgatctcagctcaccgcaacctccacctcccaggtccaagccattctcccgcctcagtctcccgagtagctgggattacaggcatgcaccaccacacctggctaattttttgtatttttaggagagacagggtttctccatgttggtcaggctggtcttgaactcccgatctgaggtgatccgcctgcctcggcctcccaaagtgctggaattacaagcgtgagccaccgtgcccagacccagctattttctttctatgtaatctggaactgcttttggaaattttaaatgaatcacaaaagactacctagcaaacaatgcaatgtgtacaaattttggccataaggaccaggcacttttttttgtatttttttttttaaacatagtcttgctctgttgctctgttgccaggctgaagtgcagtggcgtgatcttggctcactgcaacctccgcctcctgagttcaagcaattctcatgcctcagcctcccgagtagctgggactacaggagtgcgccaccacgcccagctaatttttgtattttttagtagagacggggtttcaccatgttggccagctggtctcgaactccttaactcaagtgatctgcccgccttggcctcccaaagtgctgggattacaggtgttagccaccatgcctggccagttactttctagttacttgttctaatagctctagataattacacatgaaagcaatgtatataaattaagctactaaaaaatgtgaaacatctctgggctcatgaactgaagtcacacaattaaactcttgagtgtttgaaaaaaaatctaagctgtgtacggtggctcactcctgtaatcccaacactttgggaggccaaggcaggaggattacttgagcccaggagttcaagaccagcctgggaaacatagggagaccagcctggactacacagaaagaccccgtttttgcaaataattatatgggtttggacaatgggaagctaaatatatatatgtctttttttttttaattagcttttttttttttttttaaatcagctgagcatggtggtgttcacctgtagcaccagttgcttgggaggctgaggttgggaggatcayctgagcccaccactgcactccagcctgggcaacagaatgagactgtctctgaaaaaaaaaaaaaaaggccaggcgctgtggctcacacctgtaatcccagcactttgggaggccgaggcgggcggatcatgaggtcaggagatcgagaccaccctggctaacacggtgaaaccccatctctactaaaaaatacaaaaaattagctgggcgtggtggtgggcgcctgtagtcccagctactcgggaggctgaggcaagacaatggcatgaacccgggatgcagagtttgcagtgagccaagatcatgccactgcactccagcctgggtgacagagcaagactctgtctcaaaaaaaaaaaaaaaaaaaaaaaaatctaagatttcggactcttcaatctgataagtttctaccttaaagttcagagtccaaactacagtaattacagcatgcaaagtgagtaatctaaatagacactaagtataatgtccatgagtattctcttatgaagcctgaatagctaacatttatttaagaatagctaacatttatgaaagctaacaattatgggattacaggtgcgtgccaccacacctggctaatttttgtattttttgtagagacggggttttgtctcttatgtatgaaagaagaaagattattctcatatagcaacggctaagcaaacatctattggctaatatattgtagttgcagtgtttggtctcgtgctcaatgagatgccatggagtttaggcctttcatttctatcttcccatctataaataaaaatgaaattccaacatcatactcagcaaatacacctatataagtagaacttagaatgtgaatttttgctgtatattaaacctgccattttctcaggttttagattcattctactttggggggctgggatacaataccaaaacacataaatatatatgaagttggcactaaaggaagatagggaacattttggtgtattcggatccctatgcttttgacactagcaggtataaatgagtactgatggggttgccagaaggaagaggttgtggccagtccaatctaaaagcactactttcaagggccttccataccatgtggatgataaataggacatttgttgtggcgattttgggagggagtttcaatggggcactagacccattcatcttgacacccaagaggtaataaatgctgaagaaattgttccagacttgcagggaatgtgttacatgttattaaagaaagcatatctttttttcttttctttttttttttttttttgagatagggtctcactcttgtcgcccaggctggagtgcagtggcatgatctcggctcactgcagcctccacctccgggctaagcgatcctccaacctcagcttcttgatagctgggattacaggtgcatgccaccacacctggctaatttttgtgtgttttttttttgtagagacggggttttgtctctatgtttatgttgcccaggctggactcaaactcttggactcaagcgatctgcctgcctcggcctcccaaagtgctgggattataggcatgagccatcacacccggccacagctttctttttgaggacaaagtgagatggctcagagaaggcctctacactccagatgattagacagaatgaaagatggccacacaggcggtaagaaataggttgacagaggaaaaaaggggagttgaaaccataattaacaagttggctagagggagacacgacaaccagaagtaatcatgcctcttaaactagagaacaagtgagaaacttcattttaaataatagagatgggggtctcactatgttgcccaggctggtctcaaacgcctggctcaaggaatcctcccaccttggcctcctaaagtgctggaattacatgtgcgagccagtgtgcctggcaattcctgttgtttaaaccacacagtttgtggtactctattatggcagccctaggaaatgaatgcagtaatttattagtgactctggagagaagagtttaaaagcctgtgagcagagggcaaattaggggttaggaaatggaaccacttcttttatctagagacctaaaatctaagaaggtttccatgaatcctactccagctagaagagaattttataaactatgtaaatgtatacttccattactatttcttaattgaaaatactcaaacaataggccactttctccttyaaaataaagattcatggatttaattcttggctacgagaatttgctcatctgcctgaatcaaactacaaaaatagccagatgtggtggcgcatgcctgtaattccagttacttgggaggcagaggcaggagaatctcttgaactcgggaggttgcagtgggccgaaatcatgccattgcatccagtcttggcaacaagagcgagcgaaactccatctccaaaaaaaaaaaaagaatgaacacaagttaaacattttatttattttctatttggagtggtgaattttataaatgtagcacagacagcacgtttgtagagggcagggactgtatgtttctacagtaccatgtacagtctataggtaggtaagtaattaatagataatttctgatgaagataagatgaagagtgactcaaaattcctgggttagatccagaataaccacttaaaagcagcatttctggccaggcacagtggcttacacctgtaatcccagcactttgggaggctgaggcgggtggatcacctgaggtcaggagtttgagaccagcctggccaacatggtgaactctgtttctactaaaaatagaaaaattcaccaggtgtggtggcacacgcctgtaatcccagctattcaggaggctgaggcaggagaatcgcttgaacccaggaagtggaggttgcagtgagccaagactgcgccattgcactctagcctgggcaacaagagcgaaactccatctcagaaaaaaaaaaaaaaaaaaaaaggaaaaaaggcagcatttccactcccttcagtggaagggctctacacctaccccctgccaaaatccatttccagtttagtagaaccttgtctgaaggtgcaaagtttaagaactggctcaacgtttttatttattattattattttttggagacagggtcttgctctgtcacccaagctagagtgcagtggtgggatcacagcactcactgtagcctcaaccccctgggctcaagtgatcctcccacctcagcctcccaagcatctgggaccacaagcatgtgtcactatacctggctaattaagaaaaataaattttttttgtagagactgggtctcactatgttacctcagctggtctcaaactcctgggctcaagtgatccttccaccttggcctcccaaagtgttgggattacagaactgggtcaccatatccagcctcccaacaatttttttttttttttgagacagcatcttgctctgttgcccaagctggagtgcaatggcgtgatcttggctcactgcaacctctgcctcctgggttcaagagatactcatgcctcagcctcctgagtagttgggattacaggtgtgcaccaccatacctggctgacttttatatttttagtagagacggggtttcaccatgttggccaggctggtgttgaacttctggcctcaagtaatttgtcctccttgagctcccacagtgctggaattacaggcatgagccaccacactcagtcctcccaacaaatttaaaggttaaaacttttgagtgatatgtcaagaacagtctttgttctaggaccaattgtattctgaacttctttctctgaaataggatttcaaactactaggtgcagtgatcactagatcaaaattaatactgcctacccactatggtccctatctttccattcctctgcaactcttaaaatgtctctgactcctgtttagtgctgcttctgaagactcatgataataatccagcatctagtctcatcatgattcaatgctagtaagaataatgttcaaacccatcaaaatttttttttgtttttgacatggagtctcacttcattgcccaggctggagtacagcggagcagtcttggctcaatgcaacctccatcttccaggttcaagcgattcacctgcttcaccctcctgagtagctgggattacagacacctgccacccatgcctggctaatttttgtatttttagtagagagtgggtttcatcatgttggccaggctggtctccaactcttgatctcaagtgacccatccacctaggcctcccaaagtgctaggattacaggcatgagccaccrtgcccagcccatcataaatctttaaggatctttcctaaatatgacaatgcagactgtttattgccattcattaggaagcttaataattggcaaaaaaagtatttggtggaaaaccagattttaaaaacttaatttttgcataattacaacttattacttaagaatgagagatttcaatttaaactgatgttttaatacatatttcatattcctataaatatacatcttttctgagaaggagtcttgctctgttgcccaggctggcatgcagtggygcaatcttggctcactgcaacctctgcctcccaggttcaagcgattctcctgactcagtctcctgagtagctgggattacagatgcccaccaccatgcccggctaattttttttaatttttagtagaaacagggtttcaccatattgaccaggctggtcttgaactcctgatctcaggtgatccrcctgccttgccctcccaaagtgttgggattacaggcgttgagtcaacatgcctggcctcattactatttttttaacagaaaaactggcagagaagatggacactagagaatgcttttaaacttgatctgaatctttataaatatagttacagccaaggacaacagaaccttggcattctgattacaggagctccagggcaatgtagtcagcttatattcctagctgtctgattaaatacatttaaacactaggtttctaacaataaatactacatttaggatagtgttgccctctaggggcagtgagggaaaagaaattaggatgaataaaagggtctttaaggtcaggcacggtggctcactcctgtaatcccagcactttgggaggccgaggcgggtggatcacgaggttaggaaatcgagaccatcctggctaacacagtgaaaccccgtctctactaaaaatccaaaaaaaaaaaaaaaaaatagctgggcgtgctcacgggcacctgtagtcccagctactcgggaggctgaggcaggagaatggcatgaacccgggaggtggagcttgcagtgagccgagatcgcgccactgcattccagcctgggcgacacagcgagactgtgtctcaaaaataaaaattaaaaaaaaaaatagccgggcatgggatatgcacctgtaatcccagctactcaggaggctgaggcaggagaatcacttgaacctgggaggcagaggttgcagtgagccgagatcgtaccactgtactccaacctgggtgacaagatcgagactccatctaaaacatttctgaatgtccaaagtcatccatactttttgaaaaggttccgaaatggctgattcagtataaagcaattttatctcaattagcttcccatagttacttctacttttttgtgaaataaatggttattttacataaagaaaagcatgtgttgttgtgaaaaatacacagtaggtagaacacttagcttaaaaaatcctacataattagctaaaaaattatgacacttctaacatgttatattttctataaattgaagagagattcaactcctgaaatttttgagacatatgtacatattttctccctgaaagatcattaatgatggttataaaaacttttttttttttttttgagatggagtcttgctctgtcacccaggctgtagtgcagtggcgccttctcggctcactgcaacctttgcctcccgggttcaagcgattctcctgcctcagcctccccagtagctgggactacaggcacctgccaccacgcccaggtaatttttgcattttttgtagagatggggtttcaccgtgttggccaggctggtctcaaactcctaacctcaggtgatctgcccaccttggcctcctaaagtggtgggattacaggtgtgagccaccgtgcctagcataaaacttgtaagaaaaaaaaaaattctaatgctagtgagagtaatgtatccttgtatggccatttacaattcattgggggttttcacatgataccttatttgatcagcatgaccgttctagcctaggtaatctcatttttcctattttatagatgacgaagcaggacttcagaaagggcaagtaacttttcccaggtctcacagttagtaagtaatattgctccttctactttatcccattattggcaaaatgagtaaattttagcttgagagagaaagagatcaagacaaggccaaatagtattgagtcttctcagagtccagtgctgctagttctttaccaatgatgtcatacctggtgattctgcaaggtgctcttgtttctcttctctgtcctgaaattgaattaaatgtgaccacaaagccgacttcccctgaaagtacaagatgtgtaaaaatttcataagaaataattcatcaaaaaataatttctcatccaaatcattcatattccaatagccatttagaagtctggtgacccaagctcactcattcctagttgtatgacattctgagcatcttctgcatgtatcataaaggtcatcctgtacctcactgacaagactaccaagagcctgggaaaaggaagcagctaagcaaagggccagcatggcaggcagaagatttctgatgtctgctaggttgttacttggttgtatgtaattagggctgtctacatgggctacattagtaaccatggaattaaaatgctctagcagcacagaatgtacttgtgtacatctacatgtaaaatatgtttggatatatggagtggcgataagagaaaaaaatcgaggtgagaggagaaagagaaaaagggaagaagaaagaaacatgcacacatcagaaaaaaatcagaaagggagactagagagacaaaagcaaagagaccatttgaatgatttcaccctgaattattagataacttaaaatggtaaggaactgttaattctggacagtgacaaaggcaaacatttaatggaacttactagggatacagcctctgcaatgatgtgctatttcatcctttcccgcttagcaggaaagagcccaaaccacctcctgctcatgggttatattttctttttctgaaattaaaatgcctgtggcatttttctagtccccttgtgacaaaagagcctattttttttttaatgacatatttgtctccttgttacatttcttaacagggctcttaactggccatgtcaccaggacctcctaaaactgttacctgcttgacctgcaagccatggctccatatcctctccagcaggtcacaaaggctggcgatcaaggtgttctcctccaggccggtgatgtttgcttctccatggccaagttccaccgcttcatgtcccatcttctccaccaacatgcgctttgtctaagaatatcacgtgtagtcataaggcaccccagcagtgaaaccaaaaaccaacaagtcaattactaaagtaggagacttggtttcccttcattatacttctatttgcagatttgtaatcaccttgggaaaaaaatctcttaatcttgatgttcaactaactggactaatataatttatatgtcactattttgtcagaaaaatggagtgtgactaaagagaatataagataatatttgtaaggcatccccatgttgaaaagatgcttatatacaacagttgtcaaattattaacttctgtgatattggggaattacagcagacttagaaaatgtactgtcagggctgggcatggtggctcacacctgtaatcccagcactttgggaggcccaggcaagtggatcacctggggtcaggagttcgagaccagcctggccaacatggtgaaaccctgtctccactaaaaatacaagttagccgggcagtagtggcacacgcctgtaatcccagttatttgggaggctgaggcagaagaattgcttgaacccaggaggtagaggttgcagtgagctgagatcacatgccactgcactccagccygctgcgtgatagagcgagactctgtctcaaaaaacaagaaacaataaaaaaagaaaatgtactgtcagaatatggaaccccatcctgccaccacaacttgccctatcactgccccagcatcttagcatactaaagattcttgcacttagtttgattgcacttaggtaaaaaccagaatacaaatgggcagctctaaattttttgagaactctaatttgtgaatgaaccaggactttacttctccttttttatcttttctttgttcatcaagcatgcaccaaaaaatggaaagaaaatggaaatcagtttcatgtaagttaatttgcatcagtcttagtagcttttataaaatgtaaaatgaragagaatctagctcttttaggcaagaactttaattcaccactatatactgatgctgaaaatagtagtacatttattgaatatgcagagaaggtactcaagaaatgactgtcaaataaataaataaaatcattagctaaaatgatgttttaagttttgtcaatttgtactgctacctccaataaacacaggtttctgagaggagaacgttgtgcaatatacacaaacctacaacacagctaaggtatttttccttatggggacaaaaaccatgtacaggcacaaataaggttgtacacaggtgcatacacagacacaaaagtgttgcctttcacataagatgacaayattcctgacgcaaattatgagtggcttaagacatccgttcatgttggtgaggaggagagcaatgtctgaaaaggtgagaaaaatggtagaaggctctcatgtcattgattctgtggggaatgaagaacccatggaggttcaatacccsagtaaagagcacatgaggtcaatgccacagtaaaagttttcttctagcaaaattacatgcttaaatgggggttaactcagttcatcttagcctcacacatggtgtaaacatgaatgcacactgtctggcatcagtgaataatacataccttcattctacattcttttaataagccttctacgaatttacagttggtctgtgcaataactgcaggagagaggtctgacagtttgggttgyctcaggttttttcctaaacttcgtgcctcttgcatatatttctaaaaaatcaaggagtatttttaatgcgtaaacattagctattcttctaatcttcttaaccttatacaaacaagtgcagagacaaatgaaatgcaaaaaagtccgtaagtgtatgtgcatataacaacaattaatgttttagtgtactaaaagacagaggacactcatatgccaccccataacaactgttaactcctgtgagaagtaaagtgacagaaaccccatcacgttaaaactcattcaaagtgagakgacatttcatttcatttagtctttttattgggaatacaaaaggttgtgaagtcaggactgtggttgggacaaaaaaatttaggtgtttagatcacaaatccaaggttctgcaggagyccagctgttctcagatcactgatttcctccactcctttccccatacagtaagacttaacatacctctagcctcctgggcagtgctctccaatctaaccctttgctctataatcaagtcacaacagtaaaatcaggagctttcgaatctggttgtaactaattttatgactcaggtgttatcaactaatgtktgtgcatctcagcttgttaaatgggcataaaacatgcccccctacctccccaaaaggctataggatcactctgaaaagcacgatgtgctccaagtgaaggtggcctctttctgtgatgtttttgctaaagccctaccttgccttgttctataatcaagagaaagtkaattacagtgttacttttggggtttgtggtaactctaaggtatcacagaaacttaaccaaatgctcttgagctttggttagtgaatttctattaaaaaaatcactacatgtgtttagtgcaagacatgtgctctctctcttctttctatgctgtctataaaagttcatccagaggccaggcggtggctcacgtctgtaatcccagcactttgggaagccgaggtgggtggatcaccagaggtcaggagcacgtgaccagcctggccaacatggttaaaccccatctctactaaaaatacaaaaattagccacgcgtggtggtggacgtctgtaatcccagctactcgggaggctgaggcagaagaatcgcttgaacctgggaggcggagattgcagtgagtggagatggcgtcactgcactccagcctgggcaactgagcaagactccatctcaaaaaaaaaaaaaaaatcatctggataccttatgtttacatcaggatcacagggcagaattttccaaaaagtccaagtgacttaggaccatatttagagaataactgctctacattatatagtaaaagtagcagtttattggctggtagtggggggcagcatggagactgagacggcaagccagcacatcctcccacgggcacatatgtgaaatctatccttactatcttcagaggagagcttgatattataaaagaagatgtgtaaaatcctttgcattctttaaaaaagagagtttgtacatttaatatatttctcctttggaagaaaataatctgctaagtctggtacaaataaaaaaaatcccactgattagggattccactaatctgtttacctgctacctcccaacctttgtgacgaaaggcaaaattaacaaaataatgtttttttccagtccaatcattttaacagttgtctctaattctcaattttctcttatttctttgaccctcttaaaaatgtttgaagcagaggccaggcattcgagaccagcctggccaacatggtgaaackccatctctactaaaaatacaaaaatgtggcgggtgcctgtaatcccagctactcgggaggctgaggcaggagaattgcttgaacctgggaggcggacgttgcaatgagccaagatcgtgccatcgcactccagcctaggtgacaaaagcaagactccatctcaaaaaaaaaaaaatgtttgcagcagaaagaagtatacataaatgttatgagaactgcagagtttatttttattttttgagacggaatctcgatctgtcacccaggctgaacagcagtggtgcaatctcaactaactgctacctctgcctcccaggtgcaagcaattctcctgcctcagcctcctgagtagctgggattacaggcacgcgccaccatgcccagctaatttttgtatttttttttgagacggagtctcgctctgtcacccaggctggagtgcaatggcttgatctcggctcactgcaacctccgccttccaggttcaagtgattttcctgcctcagcgtcctgagtagctgggattacaggtgcacatcccatgcccggctaattatttatttatttttgagacggagtctccctgtgtcgcccaggctggagtgcagtggcgcgatctcggctcactgcaagctccgcctcctggtttcacaccattctcctgcctcagcctcccaagtagctgggactacaggcgtctgccaccacacccggctatttttttgtatttttagtagagacagggtttcactgtgttagccaggatggtctcaatctcctgacctcgtgatccacccgcctcggcctcccaaagtgctgggattacaggtgtgagccaccgcacccggccacgcccggctaatttttatatttttaagagacggggtttcatcatgttggtcaggctggtctcaaactcctgaccctgtgatccgcccacctcggcctcccaaagtgctgagattacaggcgtgagccaccacgcccggctgtaatttttgtattttcagtagagacagggtttcactatgttggtcaggctggtctcaaactcctgacctcgtgatctgcccgccttggcctcccaaagtgctgggattacatgcatgagccaccctgcccagcgagtttatttgatttttaaaatctatcaaccattaccagcagagaagtcaaatgtaacaaggtctatataaatggtctgaaggttagtttttatttatttmttattattattttttttcttgagacgaagtctcgttctgtcacccaggctggagtgcagtggctcggtcttggctcaccacaaactccgcctcctgggttcaagcagttctcctgcctcagcctctcgagtagctaggattacaggtgctggccaccacacctggctaatttttatatttttagtagagacggggtttcgccatgttggccaggctggtctcaaattcctgacctcaagtgatccactcaacttggcctcccaaagtgctgggattacaggtgtaagccaccacgccctgcctggttttttttgttttaaaacagagtctcactctgttgcccaggctgtaatgcagtggtgcaatcttggctcactgtaacctccacctcctgggttcaactgattctcctgcctcagcctcccaagtagctggcattataggcgcgtgctacaacacctggctaatttttgtattttcagtacagatggggtttcaccatgttggccaggctggtctcgaactcccgatctcaaatgatctccccacctcagcctcccaaactgttgggattataggtgtgagccaccgcccagcctgaatacttttttgtttgtttggtttttgtttttttgagacagagtcttggtctgctgcccaggctggagtgcagcggcatgatctcagctcactgcagcctccgcctcccaggttcaagcaattttcctgcctcagcctcctgagtagctgggattacaggcacatgccaccacacccggctagtttttgtatttttagcagaggcggggtttcaccatgttggccaggctggtctcgaactcttgttctcaagtgatccgcccgcctcgtcctcccaaagtgctgggattaaaggtgtaagccactgcgcctggcccctgaatactttttaaagtcaattactggattaaaaattaaccactgtcggctggtcaaggttgctcacacctgtaatcccagcactttgggaggccannnnnnnnnnnnnnnnnnnnnnnnnnnnnnnnnnnnnnnnnnncgtggtacgtgcctgtagtcccagctacttgggaggcctaggcaggaagatcaggaggtggaggttgcagtgagccaagatcacgccactgcattccagcctggcgacagagggagactccgtctcaaaaacaaacaaaaaattaagcactgtttaaagtttatgtcctgttttatataaaggaaaacaagctagacggtggctgtcctatgagtgaccaatttactgagcccccagtacatatggggcaggtacagttattagccaacagtggattccatagggccatgtgcaaagtctccttctgggcatctctgctggagccatagaaatagcaacattccatggacatgcacagaaaggatacagggggcggcaaaaggcctctcttcacagcaagaagggaggctgcctctgcaaattgcaaaaacagagcaactgcctttaaaataaacaagtgatgataaaaataacatctggaggaaaaaacatatttcaagatgaaaaatataggagagagacttttcacaagaaatgcttttataatacagtctagaagtaaccccagatttcttctgagattactactgtgctcttctttatttctgcttaagacaaatgaaacaaaccactaggaactacctatgaaaatatatcctattattcaataaacactgaactaactgctctttaatacaggctctcccagaattttctagtaaacgccctagccctttacaagttggtgttcaacttgtgaagagaagaccattgtaaaatagatttaagytagtatgacataatgggggaaaactataagcaagatttctaagttgcttgttgcctcaagtgaacagtggttagtgcaagctggcatgcagggtaaatggaaagaatattggcctagaagtcaggagtcttgggctataggtccagctctgtctttgtgtgcttttaactctgggctaatctcttggacttcaatttaatcatgtcaaattggacaagatgaccttaaagattcctcttggcactgagattctatgttgatgactgaattttctgaccacataaaatacagaccaggaaggggaaattaaaattctgtggagataaaacccagcaaaagaaaggctatttgaaattcaatcacatctgtacttctggaaaacgcttaaataaaggggagtttgtatatttaatacatttccccctttgaagtaaggcaatttgctatctagcacacaaaaaaaatcccactgattagagacccaaatgattagttttacatgtcagcagcatagaattactcatattagcacacacaaacacagaaagggactaaacataacaagaagcagagagcaaaatggggagtgtgagttcacatctcaaggtcatgtgaggcattctagagctatgtgcactcacacatgtgtaacattcaagtaacaccaaagacaagattgggggaacatctggtaaagcactttcaagcaaagaacataccaggcagcactcagagaaggattttttaggaagtcgtgcaggaggaggtggaccctggtcccactcccagaatgccatggagttctgacagaccaaaagttccccggaaggctaagaggatggagaaatgccaatgacaggaaagcaaaaaagaaaaggatagggagaaagagacaagcagaacaagcatgcatatgataaaatcacagcaaaagagagggaagggaagaaaatacagtagccggaaaaaaaaaagcactacacaggtgatgcctcagttcttaataaaatgtttaaaatcatatatgtatgaacacaacaaaaacaagagatgtttgggatgatgttttctgctttatttttacaaatttgatactagaaaacagttaacaagtcttctgattgcatttctcttttgatcataagaaacgaaacaatcaggctgggcatggcagctcacacctgtaatcccaatactttgggaggctgaggcaggagcactgcttgagcccaggagttcaagacctgggcaacatagcaagacactatatatatatgcagatttcacacagaaaaaaatcaaaacttacttgttgtataattatggtcttattttcaaagagtacaaataaaagtktaaggatcttaatttaaaaatagttttaaaacactttcaaaaatataaagtagatttagagattcaagaaaaaaaactggtgccagcaagccaagaacaaagcataggcaagtacatcacactactccttataattatgcttgaaacttagaaatgtctaggcttctcatgcagacaatttttctcctataggagacatagtaactaaaaatttatcctcaacttgatctttacttgatgtaatacacagaaagacttgttttagagccttattatagatgtcttgaaattacaaaaatggaaaaaagggtgttttctgctatatgtccgtacaaaaggattaatattttaaactataactaaacagttttttttttaaagaacattaagaatytacacaatgacatctgctggaaggaataagcctagttcatggcgcttgctgtgaggcaccccaggaaggtagaccacatacctccctcaagtcgttgtccagcccaacatgctcagaatgctggcgaaggcgttctttcctgcgctgtgcagtggcactccgacttacccagcgactgaaacaatcaaattatttaaaaatgtgttccttatctttaaaatagaaagcattaaccattcaacacaaaagactgacacacacattttaaaatcaattatttaaaaaatatatagcagctttgttaaaatataattaaaataccatactatgcacccatttaaaacatacaaccaaacggtttttagtatctttccagatatgtgctgtcatcaccacaatcagaatttttaaaaactgaggtcaaaaaggcacagtatcaatacactttagatacttacatacataacaataagtcaaatcttaaccgagttagtccttgattatattgacatataatagtaatgccttgacttgctcaaagtaaatattatgaatattttttaatacaaagaatattctcaaaacccataatttagaattacttaattctagcgtcctaaaagaatagaaatgtatgaagcttccaaccttttaaggaaagatttctatccaacttgactagttgcaatggcttacacctgtaatcctagcactttggccggatcacttgaggccagkagttcgagaccagcctaggcaacatagtgagactctgtctctacaaaaaatttaaaaaattagcctccttagctacttgggaggctgaagtgggaagataatttgagcccaggagtttggggccgcagtgtgccacgactgcactcctgcattccagcctggatgacagtgatatcccatctcaagataaatagaaagattcaaactcataagagtgagtcctcatctgtaaagtctaagggttgtactcaaagaccactgtgattcctttttgctctaaaatttcatgactgtgtttctgaagtgatagcttgtgtttatcagttttagaaaatatttataatataaactcagtatcaaaatatgcaggacaaatgagtttaaaataaaacctgagctcttttccaaggcctataaaactcttaaatataaagacctctgcttcattctctctgatcttatatcacttctcccctaattactatgttccagtatagtaacctccattctgtttctaaatgattgataaaatcagtgctagttctataataatcttctctgctactaaactgctggtatcgaaactgcctttcagatgagatcaggtgcgttcaaggtggtatggccgaagatrtaagttgccttccagctcaaatacctttgtttttggttaataatgattcaactcatgtgccctagacccagacctgccctggatgatatgaggggcttaaaaatatataatgtttcccttattcaaaggtccttttgtcgccagcctagctacctacaggctccagcttagtgtgtaagactcaaccatccagcgattatccttaatcactcctttctatcatcttcattcagtgaagaatttggaacctggctcagttttcttttcttccctgctatgggaagtacaaagactatatagataactttgtcttaaaattctggggtcgtctaacatgcaacttcacctccactcagctttagacgcaaccaggacatcacactaaatcaaatggtcatccagaactcctctccaaatccaatggtcatccagaactcctctacctcagaaatcctgaactccaccatcttagccactgacccccatctcccattacattagctcttccatgccttgactctcacttaagacccctggtgctttctcgtctttctgttatgaacataaattctgcggaaagccacctaaactaytcccattctagcactctctcctctgtaataatcctctacttccctccttacctgcccaccagagccccaaaccscggatgaagactatcccctcacttccctattcccgtacccacacagactagttcccaatttctctcacgactacccatgaatcacttcacctgccttttatcaactcttccccattctcctcaaagactactgcaaactcttcaccctcaggtacccttgcctccttcttcctgccctctacttagacaatacacacacataaacatcctcatctttcttctaatctcaaagtataaaatayattagccaaggctcaaaactgtgtcttccacttgcatccttgaccaattctcccgtcttttcaacccgctccattagtcacctcctttgctgtatcgccaatctttttctcagtggaatctcttcagctgacaagcatgttggtctccctcgtggccytctgtagtcatgttaacatctgtttcttcacacctctgatgtaaaaattcttaaaatatttagatgtaagacttctacttatttacgtttggatcttcagttcatttcaaatcatctacttcccttgaaaacgctttttaaattttgttttagtttgtttgtttgtttgagacggagtcttgttctgtcgcccaggctggagtacagtggcaagacctcggctcactgcaacctccacctcctgggttcaagtgattctcctgcctcagtctcccgaatagctgggatcacaggtgcacaccaccacacccggctaatttttgtatttttagtagagatggggtttcaccatgttggccaggctggtctcgaactcctgaccttcatgtgatccgcccacctcrgcctcccaagtagstgggattacaggtgcaagccaccaatgctcagctaatttttgtattttttgtagagacagggttttaccatgttgcctagatcagtcttgaactcctgagcttaatgcgatctgcctgtctcagcctcccaaagtgccgggattacaggtgtgtctgttcccagctgcctaaagcccccccactttttttttttgagacggagtctcaggctaccacccaggctggagtgcagtggcgtgatctcactgcaacctccgtctcccgggttcaagtgattctcctgcctcagcctcccaagtagctgggactacaggtatgtgccaccaaacccagctaattttagtattgtttagtagagacagggtttcattatgttggccaggctggtctcgaactcctgacctcaagtgatctgcccgcctcggcctcccaaagtgctgggattacaggcatgagctaccgtgcccagccctaaaaatcctcttgatgaagccactgaaacccctaactgccaaatccaatggctattatttgatccttagcttactcaaaacctcttctacatttagtactgctgatcgctctttctacttttaagctcctgcaattttctttttttttggagatagagttttgctcttgtcacccaggctggagtgcaatgccgcaatctcagctcacggcaacctctgcctcccaggttcaagcaattctcctgcctcagccttccaagcagctgggattacaggcatgtgccaacatgcccagctaagttttgtatttttagtggagayggggtttcaccatgttggccaggctggtctggaactcctgagctcaggtgatccgcccgcctcagcctcccaaagtgctgggattacagacgtgagtcactgcgcccgacccagctcctgcaattttcaacctcagtgtttccaatgaaataagttctgtcacctctgagcctttgtccatgaagttttctcccaactttcattcacctttcagatagattagaggccactgcttccagaaagtgttctatgactctttcaaatctaagttagctacccatcctgtacgcctcaattatagtatctatcacagagtattatagttacttatctccrttttctataaaatctcctctagaagggccagtatcttgtctgtcagccatcttactggcaaagtctactatagcacctgccccccscttttttttttttgagacggagtctcactctgtcgtccaggctggaatgcagtggcacaatcttggctcactgcaagctctgcctcccgggttcaygccattctcctgcctcagcctcccgagtagctgggactacaggcacccgccaggctaattttttgtatttttagtagagacggggtttcactgtgttagccaggatggtctcgatctcctgacctcgtgatcctctggcctcggcctcccaaagtgctgggattacaggcgtgaaccaccatgcctggccatcatctgccccttgtataaatacaattaagtaaacagagatgcagtctaacatgtaggtttacagatgttcatcacagcatatagatatgtaataacaaactgtatttcctttattccaagactcacattttggcttttaaatgttcctgaaattaggatgcatctttcagtccatatgcatgtttaatatatactttttcctaaaagcctttgagttaattgcagatcgtacaaccaacagtagaatcaagaaaayatactcaaaacaaccgaaatgttcaacagtagagggtagtatacaatgaaatctcatgcagtcattaaaaaattcaaatttctaataatatgagaatgctaatgatacagtaataaaaaaggtataacattctataaacattttaattttgtttcaaaaacaagatgtgtgcactcccgttctcctgctcccccaaccttgctatgtaagagcataatatcacattttaacattccatggtgatgcgattctgagtggttaaaaattaaccccatcactttctagtattccagattttttctttttttgagacgaagtctcactctgtcacccaagctggagtgcagtggcttgatctcagctcactgcaacctctgccgctcaagtgattctcctgcctcagcctcccgagtatctggaattacaggctccagccaccgtgcccggctaatttttgtattttagtagagatggggttccaccatctcggccaggctggccttgaactcctgaccttgttatccacctgtcttggcctcccaaactgctgggattacaggcatgaggcactgcgcctggccaatattccagatttttaaagagcaaatattgtatccatctattttttaaaattttctcagctcttacctatcatcctcatgaaatgtattcattatcctaagaatacttactctttttacaatggtatcaaggaaggtagcccctctcaaaatagtttcttaagaagaggagtaggtttatggtttatataagggaaaaatgtgcaaagatctagttacagatctttgaagtggaatccctggaaatgtctccaaagcaaaagagcaatgtaagactgtaaaaaggatacaaaaagaatcgggggtgattgaaaattatgaaccacaaaaaacacattaagattctgaaacagaatataaacacaacctgaagatctttaaaggggaagaatagaatataaataacaaacaaaatgtacaaagacctgggtgtagatctttgatatggaggccttgaaaacagccctgtagcaaaaaaggtcagtataacacaaagtttgctcagggattttaaaaattagggttaatgggcaaggtagtccaaataaatagtaaaaatatgaaacagaatataaatactagctaacggacttatataataaacgaaaaggaaggcacaaaaatataaatggcataaaactgtgtctttggcaggcagaaaaggataaagattaacttaaatataactagctcttactatacactctgtggaacaaaatggcctacttaattttattttcaaaacagggaaatgagcactgygcttaagcaaaytgctatgaagtccacacattcctggtcttgttaagtaattaatttattctttgcattattaaactttatttactaagcataattttaccaatgataatcacaattgctgaaatactaaagactgcttattttgttctgtcttgtaaacagcatatgaagttctctcaacagttgatccacaggcatggttataaatccatttaccctgcaattgttctgagatcttttctcttgactatatctacctgaaaacgtaatgactgaggcttcgtgtggaaatgggaaaccataagattatatataaggcaaaagcaagaaaataaggctataagatttcaaaattaaactcctccctcctaagcactctctacttttctttcctactttgtttttcttcataactcttatcatctgacatgttacttgacatattaggttccttttttttttgtttacttgcacttggaagcagagatttttgttgttttgttcattaataaactcgtggtgactaggacagtcctcacatatagtaagagttccataaatatttgccaaatgaatgaatgaacaatctaatgccatcaaaaggaaaaaaaagcaccgggtgcagtggctcacgcctgtaatcccagcactttgggaggccgaggtgggcggataacctgaggtcaggatttctagaccagcctaaccaacatagtaaaaccctgtctctaataaaaaaataaaattagcctggcgtagtggcgcatgcctgtaatcccagctactcagggaggctgaggcaggagaatcgcttgaacctgggaggtggaggttgcggtgagctgagatcgtaccattgcactctggcctgggcaacagagggagactccgtctcaaaaaaaaaaaaaaaaaaaaaaaaaaaaggaaacaaaaactgttaaactaatagtctatccagatcaaagtgattcgaacaattaggatacttcacaaataaaagaaaaaattaataaactgatggctaatctgttcttatggaaaattctcttaattatcatccacttctgaaaaatagaatattgtatctagtaccattatctggaaagtttgaaccctcacaaccatcagtatctattagcacattttttttctttttttaaaataaagatgaggtctcattatgttgcctatgctggaggttattcacagacacaatcattgcacgtcgtggcttccaactcctggcctcaaggaatacttcctcctcagcctcccagtaggtagtactggggagtgccaccaggcctcgcatcttagcacattttttaagttcagtgtgtataaaagcagggccaccccttcactggagggtgaaaccctgcaaactaaggcaagtacaataaaaatttcagtcattagttatttgcttctgtcttgtaagcagcatattaaatgctcttgaacaattttcctccccaagactttggtataaacgtgcattttctacaagaggagaaaatttcattctgaatatataacttttccacatttctagtgaaccatcctctagtactgccttcattaaagttgagacagccttttaaatgaaaggtcaatcaaacgaagggttttttgtttttttgaaagagggtctttgcaaggttgaccaggctggaatgcagtgatgcgatcacatcatggctcactgcagcctagacctctcaggttcaagtgatcctcccacctaagcctcaccagtagctgggactatagttgcatgcctgactgcctcccaggctccagtgattctcatgcctcagcctcccaagtagctggcatgacaggcatgcaccaccacacccagctaatttttgtatttttagtagagacggggtttcgccacattggccaggctggtctttaactcctggcctcaagtgatacacttgcttaggcctcccaaagtgctgggattacaggcatgagccaccatgcctggcctaatttaaaaaaaaatttttgtaggggcttggcctggtggctcacacctataatcccagcactttgggaggccaaggagttcaggttgcttgagcccagaagttcaacaccagcttgrgcaataaggcaaaatcctgtctctataaaaaaatacaaaaattagctaggtgtggtggcatgtgcctttagttccagctacttgggaggctgaggcaggaggatcacgtgagcctggggaggtcaaggctataatgaaccatgatcgggccacagcactccagcctgggcaacagagcaagaccttgtctcaaaaaaaatgtatgtatttttttgtagagacagggtcttcctatgttccccaggctggtctcaaactcctgggctcaagtgatccttcctgcctcgtactcctaaagtgctgggattacaggcgtgagccaccgtgcctggcccaagttttttttttgagacagggcctcgctgtgttgcccaggctggataatagtggtgatcataggtcactgcaacctccaactcctgggctcaagtgatcctcccatctcagcctcccaagtagctagggatacaggcatgtgccaccacacccagctccaaatgaagttgttgttgttgctgtttttaatccacaattctttttaatactatttttattttttgagacagggcctgtttcccaggttgaagggcagtagtgcaatcacggctcaccgtagcctcaacctcctggggctcaagtgattctcccacttgagtaaatgggactacaggtgcacatcaccatgcccagataatttttctatcttttttgtagagacagggtttcgccacattggctaggctggtcctgaactcctgggctcaagctatctgcctgcctcggcctcccaaagtgctgaggttacaggcgtgagccaccatgcctggccacaattctttcactttactgtttggtgttccttttctaaatatttaaaaggatactaaaactaaaaattttcttttcaaaaaattttctctttagctcttcaagagggaagatagagcctaagaatatatcttgctacccaaagtactatcctgtcttctctggaaccactcctcttaacagaacccagtttaaggcagaggtgagacatctgaaggctctttcatctggaaggatctcattagactggtgtgacaggctgttgctaaactctcttatgttctcctaaaagctggaaaaggcaaggaaggatcattccctagaagcctcgaagggagcgtggccctgccaattccttgatttcaaatttctaccccccaaaactgtggaagaataatttctgttgttttaagccactgagtttgtggttctttgttatagcagccctaggaaactaacacagatgataaaggtctaacctttctaaattccattagatagtattatcattatatttaaatcgccatttaaagtgtggcttttccaagtgtactttgcttgaaaaagaaaaaaaaatctctagcctttgtttttttctttttttttttaaatgatggatttaaaggtcaagcactgacagaagtgtcaatccatatttcaaatgcattaatgtggtcatgaaaaaagtaatcagatagatgtttaatagttaagcattgtccatttgagttgcagagcaccccacccttcattcattccttcaaccaactactcaagtgaagaacatgcttacttgttactggttggtcctgttgccaagacatcggactgtaactttggaaagaacccctgctcatatttgccttgaccaattttcatatcaagtagatgtgggtggattgcagtgtgatccattttcatcagtctctgctcaattgattgggctataaattaaatttataataaattagagacatttcattgctagcccttcaaaaataatgcttcctccactcatgcacctacagagaacccaatcactctgacactctgaaacagatattgtgtgtgtgtgtgtgtgtgtgcacgcacgcacgcatatatgcatgttttgagacagagtttcactcttattgcccaggctggagtgcaatggcgcgatctcagctcactgcaatctctacctcctgggttcaaacgatcctcctgcytcagcctcccaactagctgagaccgcaggcatgtaccaccagttccagctagttttgtatttttagtagagatggcgtttcatcatgttgctcaggctggtcttcaactcctgacctcaggtgatccaccctccttggcctcccaaagtgctgggattataagcgtgagccaccacgcccggtcttgaaatagatttttacaagggctcttcagaaattagtataatgtaagtataaaaagttaactttaagtaaatattggatgattaattttcatggtattttctgcctttgtcaaaatcagggccgcggggatgaaaagcctacaattttgtattgaaacagtttctcttaagtaagaaattcaatattcttacacaaaaatatggttctaagtacaacattaaagaaaatgatagcaaataaaatatttttcttgagctgaaatacaagttaaagagaagacgcaagcacaatggccttattaactttacttctttatacaaagacctattaaatattcgtggttctccatctgtaaaaacaaggaacggtgtgaagtttattacctcacttttagcaacagtcacgttctcattagtaggagtcattttggagtgtttattagatcaagaaggtaatacagcaaaaagtcatataagcaggcatttagaaaatgtccagaggataagaaactggccttttgaagaataaaataggtgaatgttaagataggattactaaacatttctattttaaaaccactaagagtcagggatgttggaagatgtctcaaagtccccagaaacagtgatctatttctcaggtaaacaaataaataaaacctgatcttaaacattttaatcaactgaattgtcaagagaaaatatattttagaagcaagcctaggtctctgatcctctgcctagagattacttaaaaggggagaacaagcagtaatggtagttgtgtgataaacagaacacactgtgggagctgctaattttgtgatttaagagaagaaccaggtgcctttataaatatttcatagaatcagtttatgttgccccttttccttttttttcagatggagtctaggctggagtgcaatggcgcaatctcagctcactgcaacctccacctcctgggttcaagcgattctcctgcctcagcctcccgagtagctgggattacaggcacccgccaccatgcccagctaatttttgtatttttagtagagatggggtttcaccacattggccaggctggtctcgaacccatgaccccagatgatctgccctcctcggcctcccaaagtgctgggattacaggcgttagccattgtgcctggccacagtggtattttcaagagtattatataatttctgtgatgacagtgggagtaccaaactctctgagaggctgaaagaaaatctattttaattggaaagactttctggaagcacacaattaaggtattggtgcttagttccatctaaaaaattccatcaggaagggagaaataaaatttgtgcaacaaggcattatgctattcacatggctattaaggcactggaagtcattttattctctgaacaaggatagacaatttcattaattctactttctcaatttccaaaaccacataggtaattgccacttcctgaaggggctccagggatctaccctgattcgtgggaatacaacagggtgatgtttctatggttacataaaagacatcatttacatacttctcccttacatacgctaaagcttcagcatcatcattcctgactttgatctatttaagtaaagtgggaaaggcaggcaagcaatcaagagagacagatcaaggaagctccacatttgctgcctcctttttctccagaggaaaagttgctgtcaaataactccaacatttgaagggaaagaaataaaagggagggccgtcaggtgataggtatctgcttatctggcaaagaacaggttarggaccaggcataattgtataaaataagtgtggactagtacattttacatagttctttcttgaatgaacagctaacatgatgtkaaggcttcctgtgccagaaatcagacctggattcaaaccatggctcgaccaatcactagctatgcaaccaccaaccacaggcaagttacttaacctctcagttttctcaattgtaaaatgagggcagtaataaaacaaaataaaaataagtattccaggccagacatgatggctcatgcctgtaatcctagcattttgggaggccaaggcaggtgttttgtttgagctcaggagttcaagaccagcctgagcaacatcgtgaatccctgtctctaccaaaaatacaaaaaattagccaggcatggtggcatgcatctgtagtcccagctacttgggaggctgtggtgggaggatcacttcaacccaggaggcagaggttgcagtgagccgagatggcaccactgcactccagcctgagtgacagcgagattctgtttcaaaaaaaaaaagggtgctgggctcacacctgtaatcccagcactttaggaaactgaagcaggtggatcacttaagcccaggagttcaagaccaaccaaggtaagataataacctgagcaacatggtgaaaccctgtctctacaaaaaatacaaaaaattacccgagggtggtggcacatgcctatagtaccagttccccaggaggctgtggtaggaacatcacctgagcccaggaagttgaggctgcagtgagccatgatggcaccactgcactccagcctaggcaacaagtgagaccctgtctcaaaagaaaaaaaaaaaaattcgtgaacacctggcatgatgactgacatagtaaatactcatgttggctattaatatgattatttatttaatggactatattacactcctagacaagactggctaagactcagatttaactgctttctttttatttttttgagacggagtcttgctctgttgcccaggcgggagtgcagtggtgccatcttggctcannnnnnnnnnnnnnnnnnnnaaaaattcccggagggggggccaagccataaaggaccgttcccacggaggttgggtaagacatccccctaagcccaaaaattagggcccaatgaccactagggcccccctgcttccaggctaggccacaaatgagaccctgttcaaaaaaaaaaaaaaaattcgggaccacctggcatgatgcctgccatagtaaatactcatgtggctaataatatgattatttatttatggactatataccactcctagacaggctgggctaagactcagaattaactgctttctttttattttttgagacggagtcttgctctgttgcccaggcgggagtgcagtggtgccacattggctcactgcaacctccgcctcccgggttcaagtgattcttctatgtcagcctccctagtagctgggattacaggcgcatgacaccacacctggctaatttttgtatttttagtagagatggggtttcgccatgtcggccaggctggtcttgaactcctgacctcaagtgatccgctggccttggccttccaaagtgctgggattaaaagtgtgaaccatcacgcccagcctgagtcagatttaatttcaataagtgaagctattataattaatggcactactaaagcaaagatactgttttagtatgtaaattaagcagaatctaagatttactgttttaaataaatatcctttcttggatatagagaagaggtgagaagtaaaaatgaaacataaggccgggcrcagtggctcacgcctgtaatcccagcactttgggaggccgaggtgggcgatcacgaggtcgggagatcgacaccatcctggctaacacagtgaaaccccgtctctactgaaaattcaaaaaattagccgggtgtggtggtgggcgcctatagtcccagctactcggggcaggagaatggcgtgaacccgggaggtggcgcttgcagtgagccaagatggcgccactgcactccagcctgggcgacagagtgagactccgcctcaaaaaaaaaaaaaagaaaaagaaaaagaaaaagaaacataagtagcaagacagaaattaacattttttccatttaggcaataaagagaataaaacaaaagtcaggctggacrtggtggctcacacctgtaatcccagcactttgggaggctgaggagggcagatcacctgaggtcagcagttcaagaccagcctggccaacatggtgaaatcccaactctataaaaatacaaaaattagtcaggcgtgatggtgcgtgcctgtaatcccagctaattgggaggcagaggcaggagaaacatttgaacccaggaggcggaggttgcagtgagtcaagattgcgccactgcactctagcctgggtgacagagtgagaaccatctcaaaaacaaaaacaaaaacaaaaatcatagcaaccttccagacatacttgattcaatttattattgtttttcctcttctaagagaagaggaacgtcaagtaggagtaggactcagaaagaaaaatttacaaagcatttcgtgatatagtaccaggattagccatgaagtctaaaactgaaaattaattttgttgtacrtaaggccagcaatttgtgggaaaaaagcgataatggattttaatttaatttaaaaggcatggcaaatgtacctgcttcttttaaagtgctgcatttctgatayatagatgtccgcaaggtgggtgcccttacattatacagccttatcttatcaatccgagtgtcaaagacccgaagcaaaggatctttctcttcccactgagacataattttattatcaataaaggtggcaaacatctgtgtttcaatgaagcgtgaaagaaatggcaggtaaggctcaggctggtcagacagaaaggaagcctgtaatgagataattaggaaattattagtgcaaagagaccatctcaacactacatgataagcctgaaaattatgttaactcaggacattccttttttaaatcttataaaactgacacttgaaattcaaaaatccttaaaaatccacttttctttccattttcctaaatttagagaatgtacgtcacttaggtctttagcactgatcttaccttacaaaatttacattctgatccttatgaccattatgtagcaaagagggcatcagtaacgaaagatggcagataagttgctatacaattgtcaatcatccacttcacttgcagttaaaaatttttatccctttccccaatgagttgtaatttcgttttttttttttctttgagatggagtctcgctctgtcgcccaggctggagtgcagtggcacgatctcggctcactgcaagctcccgcctcccgggttcatgccattctcctgcctcagcctcctgagtagctgggactacaggcgcctgccaccacgcccggctaatttttttgaatttttagtagagacggggtttcaccatgttagccaagatggtctcgatctcctgacctcatgctccgcccgcctcggcctcccaaagtgctgggattacaggcgtgagccaccgcgcccrgctacaagttgtaattccttctgttctctattcctagcctatgaaatatactttcaagccacaaggtagtgagatgattaactgatacaataaacacatcagcattaatcttaaaaaagacatggaatttatgcttakgggtgaagttcttttgttcttctttaagtgaatgcttttctagactctttaactctgtgagaaatcaatagatgagtgttaagccaaggaaaaattccttccacacctgtgctgacacaacagtctcagccttaacaactaaaaaaggcactgcctggaagctgggcatggtggtggccacctacagtcccagccactagggaggctgaagccggaggatcctgtgagcccaggagtttgaggccagcctaaagaaacatagtgaaaccgcatttccaaaaaaacaaacaaamaaaaaacaaatcattgcctgaaaaaccatcagaagcaagcctttggagaacgagtacaataagctgtacacctttcctgttactagcctgtctgatgcatgggatggttcagtacatcgtaatcagttcctaattaaaagtgtcatttttttttctgttgttcttccatgctcatgtgtgtacagggattctacattcaatgcagtactaaaatctggaagtaaatttggaagtaaattcctattttggttgctgggttggtttttatttttgcatggcagaagccagaaggggaaaggggaaagaggaaagagaaataagttctgacataaggtgacttttaaaaatactcatcagcttcttgctagcatatttactttcattctgaaatttaggaggtcttcttaaaatttccttatagaaatccacttattcactttaagtagttccatagttcaggtgtatatacataaatccaaataaccacagaaagattcacagtagtctagaaatcagttcaccttcaccaataaacatcttacttttcatacatcaaatagcctttttttwaaaaaagtgggccaaagatctggcttttgatattcagaccctcataractataaaattttaggtcaacaacgatttggcttgtacgactagtatgtcctgcagattttcctagtgaaaggtacttataagccttctggaatccaacagaaaattttcatttctttaggggttatgtaaaaagaattccatttatatagtttgaggctacataaagattaagaaggaaggaagtatcagggcttgatttaggtaagaatttgaattgtcccaaggataaaccatggatatacacagattagtttttttkttkttttttttttttttgagacagagtctcgctgtcgcccaggctggcgtccagtggcgtgatctcagctcactgccaagctccacctcccgggttcatgccattcttctgcctcagcctcccaagtagctgggactataggtgcctgccaccacgcccggctaatttttttgtatttttagtagagacgaggtttcaccatgttagccaggatggtctcgatctcctgaccttgtgattcgcccgcctcagcctcccaaagtgttgggattacaggcgtgagccactgtgcccagcccacagattagttctaagctagataggaaaaagtatggaaaatggttaagactaacgaaaaaggaacctaagggcatacacttaaagaagtgaagtcttgttaatattaaagaagttttctcaaacgtaagtgcatcaggatgcttttgtagttcataaatgtaataattggcttttcatgctcatgtgtgagatgtaccttcctcaaactttgttaccatgttagaacattacctgtctgatgtggggaaaaacaaagaacaccagaacgtaactgttcaacatacaatatcatcctccaacagaaaaaatatctgatgaagtaaaaaaattatcttttatttgtttttttgagacagggtctcactcgctagcccaagctggagtgcagtggcatcatcttggctcactgcagcctcaacttctgaagctcaagtgatctcacctcagcctccagagtcattgggaccagaggagcacaccaccatgcccggctaattttaaaattttttgtagagatgagttctcactatgttgcctaggctggtctcacactcctggcctcaaatgatcctccagcctcaacctcctagtgttgggattacaagtgtgagccaccatgcccagccactatgtacctttacgaaaatttttcattatttccaaaaattctccagtactgtagattagcctcttggaatgtatcagcccctttagaaggcctttcatgacccaaagaggccacttagtgaaacccatgatacattctaatagcagtattatacctcagcaatcacagcagtaaagaactaaactgtaccctggtgacctaaaagagttactatacaaccctaagtgcatctgtctgaaaaataaaatctgggagataggtgaaaaaaaactggcagaagaatccagtaccccttagaaatcacaggacaaggaaagctggtatattttctgacttctctttccaaartctttggaaytgttttacacttacagccataaaacttaatttagtcactctttttctccttttatcttaaaatgagatagagaaatttggcttctgaaaccaaactgttaactttacatggacaagttgtgacttcctgataggataaagactaaataaatgatttctagactaaataaakagatttcttcaaaaaggagtaggcttatttaaccatacttgatcataaagtaagagtaaataaaactgttataaggttaaacagtattaacagatttggaaaacctgcaaaatgtaagagtttctataawtttttatttatttatttattttttttgagatggagtctctctctgttgcccaggccggagtacagtggcgctatcttggctcactgcaacctctgcctcccgggttcaagcgattctcctgcctcagcctcctgagtagctgggactacaggtgtgcgccaccacgcccagctaattttttgtatttttcgtagagacggggtttcaccatattggccaggctggtctcaaactcctgaccttgtgatccgtccgcctcggcctcccaaagttctgggattacaggcatgagccaccgtgcccggcctgagtttctataatttaagcatctttaaggtaaagaaaaattgaaaatgagattacaggcaatttaacgcacaatttaatgaccagttcaatgagctggtttatttgcttgtaaaattattttatctaatgtaaaaatacttggtaaagaaaagttcttaatggggctggaagacaaaaagtctgcatttaaaaaaggttaacaaaatcaataatatatgggtaagcataggcacagaagaataaaaaatttaaaaatgttaaaatcaataataaagccactaataaccacaaaaggaaaactatggttctttttactttgtcaaagttctgcatctgttcccggttggtcagccaggattccatgtcctgsgcagtctgaatgacaaatgcttcgtaatctgcaaacatctgtgtaaaacggttagcaaagacctctcggagctgtacattgagctggtagtcccttagttctgcctcttcacaatkcagttttaaatccttgtctttttcacccagagaagcagagaggtccattytttccacagccacaccagtacgcttggccagagcctgcaagcgggctatggtttcattgcccttcagtaactcatacatgctgatgttattagtacagacattgccgttctttttgtcattgaccaagtctttcagaaccatattcttcagtttgctggtactctcactgcaatgyaggctgccctcaggagggatcccaaattgaacaagaacctcagagagttcttggataaaatccactttattggggaactgtggaaattcttcaggcaactcaataaaatggttgtcaatgtccacaaaacacaaattagcctgaaagagaaaaatgaaatacaaaggtttaaaataaaggaattgtatgtgctaacatattcttgccagccagccacagtggctcacacataatcccagcactttgggaggccaaagcaaaaggatcgcttgagcccaggggttcgagacaagactgggaaacacggcaagattctgtttctacaaaaagaaaaaaaaattcttgccaactattacaaacaaaagcatagattatggtgccttttatgttaatctttgcaaggtttagaatttcttattctttaaaaataacctctttttccatcatttttccctatgtgagttttttataccatacttaatatatatgaataattttctctgggtctcagcaatatattataatctgaatatgattttctaacaattggcatccatttaggcattcctatgtgggtaagcgtgcccagactcataagaccttacaaatacatgatattaggtaaaatgctcactgtatgcacttgaactttctttgccactccactgctctaacatctgtaatgcagaattgacaataatcaccaaaaaccagcagctgtagtatctcccaataggatgaaactggcaaaatcaatccaattcacagataatccacaaattttaactttactcaaaattcactaaacctcctagagcaaaaccatttcagaagtcattatacctaatgcaggaggcagagagaggtggtagaggcaagtgcatatgtaactaygcacttgattaacctttgaataattaagagttcacacaagatatttttgagttgagtagaagaggtgacagaaatcagaagaaatgtttgagtttgtttacactctacatttggaatttattttgaataaatattttaaatatttttcaagtagatatagaaaattcaagaggccaagcatatgtataaagttctgattatccctcaggtatctgtagtagacttcaaacagtatttaacctctactgtccatactctcttaatcasgacaaggttgttagttaaaaagaaggttgtgyttctagattggggggtggagtgccaaaagtgtagcccatcacataaaaataatattgattacatcaatggttgaacataagacatggggtggaagttaataaacaaaayaggaagcttcactatgtgtttctccctggctcccccacccccaggcaccaaggggaaaattcacactgctctctgatcctagacggcaaagtaaggggaaaggggaaagcaaccagtcgggtctttgtttttctcttttgatccttgctcttcatgttagataccaattagcaagcagcatagtgaaactctaaattaagctcaataaaaactcaaaatgaggcctagcatggtgcctcatgcctgtaattccagcactttgggaggctgaggcgggaggatgacttgaggtcaggagttcaagaccagtctggccaacatggtgaaactctgtctctactaaaaatataaaaattagctgggcatggtggcatgcacctgtaatcccagctactcgggaggctaaggcaggataatcacttgacctcaggaggcagaggttgcagtgagctaagatcgtgccactgcactccagcctgggcaaaacacagcgagactttggccaaaaaaaaaaaaaaaaaaatttcggtttccctcctttcaaagccagatgatcaacaatgattcctaaagcctgatgtaatctttgaatccagtcttttaattttgcagatgaagaaaccgaggcccaagaaattaggtgacttcctggcacctgttccaaatgtgcaccctcaaacagcctggtggcttatggcctttccctgctatttttcctcacctccaatgtcagcagttttctctaaataaataaagagctgaaatgtcgcatcttgctgaagacagtagcactgcctacaccattcttttcttttctttttttgagatgtagtcttgctctgtcacccaggctggagtgtagtggtgcgatctcagctcactgcaamctctgcctcctgggttcgagcaattgtctgcctcagcctcccgcgtagctgggattacaggtgtccaccaccatgcctgggtaatttttttatattcttagtagagatggggtttcaccatcttggccaggctggtcttgaactcctgacctcgtaatccacctgcctcagcctctcacagtgctgggattataggtgtgagccactgygcctggccggcctacaccattctttacactgaaaggcttaaatgaaggtcacataatttgaatggatgattcagtatcttttttttttttttttttttttttgagatggagtcttgctctgttgcccaggctggagtgcagtggtgcgatcttggctcactgcaacctctgcctcctgggttcacgccattctcctgcctcagcctcccaagtagctgggactacaggtgcctgccaccacgcccggctaattttttttgtatttttagcagagacagggtttcaccgtgttagccaggatggtctcgatctcctgaccttgtgatccgcccaccttggcgtcccaaagtgctgggattacaggcgtgagccaccgcgcccggccaattcagtatctttaaaatggaagaaaaaatttactaatttgctaatctaaatgttaaccagcaacctcccaccacttagattttgtactatcaccttcactaatgccttcctactacctttttctatccctctcctcctcctatgaaaagggaaaatgatacattttctgaaattttaaagcttattatggtcatgaaatcactgctgagctgagtgtactacaaagtaggagttccaacaccatagctactggtctgtcttcatgatcccacaaaagtctcctatgtctgcttaagaagggcccaagctggggctttgattatctcaaagtagaacaggaaatacaaactgtgttatgaaaatgtattgaagaaaaccaaaaagccctttctccaaaacaaacgagaactctataatagggcattctgataagttgcttctcacttttaacaccattaaattaaaaaaaattcagaagagctcaataagtattacatgataaaaatttactcaacacctcaatctgacattgctttaggactaaatatttctactgatcaacactgctcacaagccttcatgatatgtaactacttcctattaaaaacaacaaaagtgggctgggcatggtggctcatgcctgtaatcccagcactttgggaggccaaggtgggcaaatcacaaggtcaggagtttgagatcagcctgaccaacatggtgaaagcccgyctctactaaacacaaaaaataagctgggcgtagtggcaggcgcctgtaatcccagctagttgagaggttgaggcaggagaatcacttgaacccaggaggcagaggttgcagtgtgccaagatcatgccactgcactccagcccaggcgacagagtgagactccgtctcaaaaacaaaacaacaacaacaacaaaagtggccgggcacagtggctcatgcctgtaatcccagcactttgggagcctgaggtgggtggatcacttgaggtcagaagttcaagaccagcctggccaacatggtgaaaccccatctctagtgcaaatacaaaaattagcgaagtgtggtggcrtgcacctgtaatcccagctatttgggaagttgaggcaaaagaatcacttgaacctggcaggtggaggttgcagtcagctgagacggcgccactgcactccagcctgggcaacagagtgagactccgtctcaaaaaaaaaaaaaaaaaaaattccctcaaaagtaagaaaacaaaggcttaaagcttaatcatctcttctgtcatgaaaccttcctatacccttaccctaaaggcattctgatctcctctggatcttctctgttcattcattcctcttactgacttactttttaacttgtgttattggtatttgtaaatgacttttttgaaaagcagaaatcacctctttttgacttggtgtctcccactgtattctacacaaatagtgtatgagacaactgtttggcaaatgaaagaataagctctgaggagatggtcatttgggggaaccctaaaactgtaggccggagcaggaagtatccacaaatgagagactaatgcagctctcttcatgtttagtaagtgatctcacttctcagtgtctgaagttaagccagcttgagggtaagccagagagaggagagcatttaaaatattccctctgggccagatgctgtggatgatgctggtaatctttggaaagccaaagccagaggatcgcttgagcccaagagttcaagaccagcctgggcaatgtagtgagactccatctctacaaataataattttaaaaaattagctgggtgtggtggtgtgtgcctctcgtcccagctactcatgaggctgaggtgggaggatctcctgagctcaggaggtcaaggctgcagtgagctgtgccaccacattcctgcctgggtgacagagtgagaccctgtctaaaaaataaaataaattattycctcagaatctcagggcaagatatgacaagaacaaagttgcaaaagcagctctgtttcagtttttctcttaactttttgtctaccagttactgtgaagatgagtaagaacagtagaaagtgaggtacattccatgcaattaatcttcagtgccttccttccactctcattctctctatcctactccctaaaaaacagtattacaaatggctacttgtgggtatcactcttaaatcatgaggatagctaattggtgattaatttataaatctatgtagttatattagttagctagcaactaaaatcataccttcttaaaataatcattttgcaaatttgttatttttgtaactatgtttagaagtcttgtcactatttttagccattattttattttagacttttcagggaaaggtggaggaaagtattactagtgagtgcatttaagtcatttttttaaatgactatttttatatctacttcctctccaaaattatgtgaagcagattatttcacctcattgtaaaatgataccagaacaaagaggctgttagccttttcttataaaacaatgatgtcctaatttatagtttctacacagaagcactgctattttcttttctttttttttttttgagatggagtctcgctctgtcgcccaggctggagtgcagtgatgcgatcttggctcactgcaaactccgcctcccgggttcatgccattctcctgcctcagcctcccgagtagctgggactacaggcgcctgccaccacgcccggctattttttttgtatttttagtagagacagggtttcaccgtgttatccaggatggtctcgatctcctcacctcgtgatccgcccgcctcagcctcccaaagtgctgggattacaggcgtgagccaccacgcccagcygaagcactgctattttcacagctaattcaggttatttcatattattctactctatgaacagatgagtatacgtatttattaagcagtgttgatctcattaatgaaaaattagaaaatcacagacattactgtaggagctttcagaatccttaaatttgtttatctttagtggatacaaacaggcatagagatggaaaggtttcccaactacagatatatcaagctgccatttaaaaatctctcaacaattgttatgaaaaatggaaagacaacatacatataaattatcttataaamtattacatggattaacatacaaaatagatcagtcactcaacaagaaactaaaatatcattaagtcttcaaaacaaaatgcatttggctagtctatttctttttccttgaaaatttaaaggattaacttcttggagcaaataacatacttgactaatttaatgaaagcaaaaacaagaacattcaaggaatagagaaaagaggtaaaacagagaagaaaaacatgcacaagcccaaaaagaacaatagtctgtatatgtctcttatgtgatctgaatcatgctattttcctttgagcaaaaaccttaatttttgtggggaaatattcattagaataaaagtaagcagtggatgattatgagaatcattacaggaaataatggctgtggcttagtgtgttaaattcacttattaaaatgagaatctctatgggaaataagaacaaataaaggtgaatctcagcatgagattctattaagaaagatgtgaattaaatagctagtgatataatgtaattaatcatcttatgttttgtaaaaggctgtggcacactcttatccatatttcatttcaaagaccttacatgktaatcctcagtaccattaacaataagtaacaattaggccaggcacggtggctcatgcctgtaatcccagcattttgggaggccggggcgggcagatcacctgaagatgggagtttgasaccagcctgaccaacatgaagaaaacccgtctctactaaaaatacaaaattagctgggcgtggtggtgcatgcctgtaatcccagctactcgggaggaygaggcaggagaatcacttaaacccaggaggcggtgagccaagatcccgccattgcactccagcctgggcaacaagagcgaaactccatctcaaaagaaaagaaaaaaaaaagtaaaaacaacacctaggaggtgttaytattcttactttatagatcagaaatatgctttcaataattcttgtttatttatttatttttgagacggaatctcgctctgtcaccctggagtgcagtggcacgatcttggcttactgaaacctatacctctagggttcaagcgattctcctgcctcagccttccaagtacctgggactacaggtgtgtgccaccatgcctggctaatttttggtatttttagtagagatgggtttcatcatgttagccaggatggtctggatctcttgaccttgtgatccgcccaccttggcctcccaaagtgctgggattacaagcrcttgtaatcccaccackcctggcctatttttttaaacatttgaaagtacaacacacagaaagtataactttaaggtggcataaaaactaggtgttagaatttttatctcaaccaccaagccaagytgacatttagaacaaataactggccttgtatctgaaaacagagaatactgaagtgtttgatatttccattatccctagtttgctgcaacatgttacttttcatttgatagaggtcaaaaataaaattcaattgatacaatgatttaaggatgctaaaacctgggctgtattgtttaaaaacaaaatttataacgtgaataaagaaaaaaaatatgttactagaataaagcaatgagatcatgctaccactgctccatcttcagaaatttatagttgtraaaatcagccactgtcttgttttaaaccaggtttaatgactatgtagtagtcatcatcaagagtctgcattctatagctcaggctctcccctagccatacttggagatttaggagagtcaaagagacagataaaattttgacaaagacaatgcaatctaacgaaagtcgccttgacctaaatcagcaaacagcaaatgcttcatcattcattgtagttttacctcttgaggaagttctagtttagaacggtcagttccttcttttgactgaaggcccatcagataagggacaggagcatcaagaaaatgtagcagagaagcaggtagaatgggcacataaacatgttgccattgaaatgggaacaaaagtgtggtgatgccttctgccacagtcatcaggcgttgataatctgcacagaacaaggaaaaaggaaagggaagagtccaagtaaaaacacaatcacttcattaagctggaaaatgtggatcttaagaaaaaaatttctgcgttaaaagtaaatatttctttatgatcatacagaaaataggtcagttctattccactrtaattaaagaattaaatggtttcatttgaatagttttaagggggtgtgggtaggtgggaaacatcacactctttgcttcttaaaatcatgggtagacgaacttatattctcttaaagtgtggaggaatcaagaactaataaaactgctcttggcatttatcccactaaaaatgtacaagatacagtgtaacattgttattatttttgagatggagtctcgctttgttgcccaagctggagtgcaatggtgcgatcttggcrcactgcaacctccacatctcggattcaagcgattctcctgcctcarcctcccaagtagctgagattacaggcgcccaccaccacaccaggctaatttttgtatttttcgtagagatggggattctccatgttggccagggtgatcttgaactcytgacctcaagcaatccgcctacctcggcctcccaaagtgctgggattacaggcgtgaaccaccgcaccaggccagtgtaacatttttgatcatttttttatacatgaatgcttacacaattcccatttttcttttttcttttgttttgagacagtctggccccgtcgcccaggctggagtgcagtggcatgatctcggctcactgcaacctccatcagaggcttttttcttacacagtatatatgactgtggctatagctttggttagctgattatatttattttagcctttattttgggggtacaagaagtcaaacagatacatgcattcatagttacactttctatgtctaacccctagccacaaaactatcatatctgggtattctcgagttaacagaaaattaaggattagtgtttttgttatgttttatttacatgaactcactagtttatcaaaattaaaagctccccacaatagtaaagcagccttttaaaccactctgcaaaggctgctttatacttacatatgtccacaagtccgatttaaatgtttggaagtagatatgctttagaattcagattttttaatttagaaaagcagtatggtgcatataccacatatatgaactatctagggcagtatcctataattaaatacattaatatttctgyagcaaaccatatatgtcccagtaggacagataatcaaagaatatgaatagggtcactttggttcaggtctggttttgctgatgaatgagttacaaaaagaatgtttggttttcagaattttttggatttgtagaattgaggataatggattgtgggcttrtaataatcctttcacagaacccactgtgaacaaacacagtaaaatctttgggaggaagaatttaggggagtctttttaaaaaggttaagaaaatgatcagatgttacttgagtcacatcaactcaaagacctgaccaagcataaacaggatgttttccatttaaattttttgtgtcattttataattttaaatgactacctttttrktaatgaatcatcagttatccacagcccaagtttacttaaaattttccttatttgattcataaagattcaaattttaggtgaaaatctgtttataggaataacttctagaacaaacaccaggtggcctaaaaggtaggggtcagtcatacgagcacaaagagctaacctaattacctggggtggatacacacattttacagccaaggcccactgaagaagctaggctgagacagctggtactctctgtgcaggtgaggcgggtagtagaggagatcagaaaatcagttcctaccactctgctaggataatcaggcagatgtttgaactgtaggcaatatgggtcttttatcccaggggcgggggcggggtgaggatgaaaagctgacctgaaacccctgaggtcggctggatggcccctagaagtagaaactgtgccctaatcagaactaaytgaagttctgcactatcacaggactccattatggcacttggcccccgtactgtctctcctctctgtgggtttcctaaggacagagtggcatccactttctctgattttacccataaagcatagggcccacttcacacccagtgctgactaaaatttactgataactactaaatgttatgttttttttcctcttaagttcaacagaatcctaacaaaatacaaaaaaaggccgggcaggcacagtggcttatgcctgtgatcccagtactttgggagaccgaggtgggtggattacctgaggtcagaagttagagrccagtctggccaacatggtgaaaccccatttctactaaaaatacaaaaattagcagggcatggtggcaggcacctgtaatcccagttacttgggaggctaaggcaggagaattgcttgaacccaggaggcggaggttgcagtgagccgggattgcactactgcactccagcctgggcaacagtgagactccgtctcagaaaaaaaaacaaaaaacaaaaagccaagcacagtggctcaagacctgcaatcccagcactttgggaggccaaggcaggagaatcacctgaggccaggagttcaagactagcccgcccatcatggcaaaaccctgtctctagtaaaaatataaaaattaggcatagtggcacatgcctgtaatctcagctacttgggaggctgaggtacaagaatcacttgaacccaggaggcagaggttgcagtgagctgcgatcgtaccactgcactccaggcctgggtgacagagtgagattctgtctcaaaaaaacaaaaaacaaacaaacaaaaaacccaacaacaacaacaaaaactcaccaggagtaggcagagacagtaatttacagttatagactatgaagaccaaatccagagaaatctccttagattctgctctgtggccatcatttcaaccaaggattggggccttttatattcttgtaacctcagtatctaccacagtatctgacatataatagaggctaaaacaatatttttgaacgaatagatgatgatgggataagaatatatataattttgctagatatctataacttaaaaagacatgcttagattttattccatccatgtgttgtgagtgttctatgtctattcttctttccagttctgyattctcttcaagactggttgaagtaccacacacattattaattttttttttgagatcgagttttcactcttgctgcccargctggagcgcaatggctcaatcttggatcactgcaacctccacttcctgggttcaagcgattctcctgcctcactcagcctcctgagtagctgggattacaggcacacgccaccacacctggctaatttttttggatttttagtagagatggggtttcaccaygttggccgggctggtctcgaactcctgacctcaggtgatccacacgcctttgcctcccaaagtgctaagattacaggcgtgagccactgtgcccagcccacacrctttttaataatgcaattactcagcagaaataagacaattctttttaactgaatcaagaaataaaaggcagagttttcttctttaagcattttttttaaacttaaatattttaggaaagtctttttataattgatactcaaagtgatgaatgtataaaagaagttattttaatatttaagacaggcctcagcaaggcacatgaggctyttcatgatttggcccttgtctgcctcattccttatcatcactccatatgcagtaagaccacttgcttgcagtccatgttttcacaggccttgtgccccttgtatattgttttcctctgcccagaatgtcccttcctcttgcactgcctgactaggttccactttttcctcaggcaattgcttctttggaaagccttccctaacacttcttattatcaccagagtactatctacatgcttcaacagtaccctatctttatttccatcccaggaattattcatctcactgaaacattacaattctatcataattctctcttcatggtctctcttccycaataccccatcatctcctagagagcaatatatgtatttttctttttatttatttatttttggagacagggtctcactctctcgtccaggctggagtgcagtggtgcgatcttggttcactgcagcctctgcctcccaggttcaagtgattctcatgcctcagcctcccgagtagcttggattacagctgtgcaccaccacgcctggctaattttttgtgttttttgtagaaaggggtttygccatgttggccaggctggtcttgaactcctgacctcaagtgatctgcctgcctgcctccgcctcccaaagtgctgagattacaggcatgagccactgtgcctggacatatctgtatttctaatctcagaattgttaacattcaacatatgacctactacatgatgagtagccagtaaacgtgctttgagaaattaatatgttaacatctaaggcatgtaaaatgaaataaaagtagacattaaaaaattatgcttgactatattatacaataaaaacatactgtcaaaaatgtgcctagtgatggctctggcacagatcccaaggtggcaatggcctctgctgcctcagcccctgccaygctgtccaccagcatcactgtggagaataaggtcagcycctcaagggcaacagaggggtctaggtctggacctgtggctggcggcacaggagccatggtggtgcagaccagragctgtgtctagcaaggcttatgccctgccaagcactgccaatggagatgtgaagctgctggtggtatccagcaygcctctggtggacttcctgatgtagctggaggattatacacctatgatcctggatgctgtgactgattattttttatttttgagatggaatctygctctgttgcccaggctggagtgcagtggcatgaacttggctcactgcaacctccgcctcctgagttcaagtggttctyctgcctcagcctccccagcagctgggattacaggtgcacaccaccatgcctggctaatttttgtatttttgtagagacggggtttcactatgttggccaggctagtctcaaactcccgacctcaagtaatccacctgtctcagccttctaaatgcagggattacaggcgtgagccatgcgcctggcccaatgtgactgagcattatctgaattatgttggctttgaggtctcagacacatgcataatttggcttatctccctagtttcacagaaattcatctcaggtattgccaacaatgacctacggcactagaaaatgaaaggcacagcctctsgcagctcctgaagtaagagcaaagactaatcatggagtacttgacccctgtcctcagtatgacatcaatgtggagccaccacaccacctaagccacccaayctaaacatgtttgtctgtaacaagcttcactgtgaccaaaaaatgtcaaagaaagggctaattgtagattaaacacaggtaaagagagaattcataaagcwggagacagatgtggagaaattacccagaatgcagcacagagacacacagaaaattggaatgaggctgggtgtggtggctcacgcctgtaagcactttgggaggccaaggcgggcggatcacaaggtcaagagatcgagaccatcctggccaacatggtgaaaccccgtctctactaaaaacacaaaaattagttggtcatggtggtgcacacctgtggtcccagctactcgggaggctgaagtaggagaaccacttgaacccaggaggcagagtttgcagtgagacaagattgcaacactgcactccagcctggcaacagagtgagactccatctccaaaaaaaaaagggttgagagataatggaagattgagcaagacagattaacatgtttaaggctggacacagtggctcatgcctgtaatcccagcactytgggaggccacggcgcgtggatcacttgaggttaggagttcgagaccagcctgaccaacatggtgaaaccccgtctctactaaaaatacaaaaattagctgggcatggtggcatgcgcctgtagtcccagctactcaggaggctgagacaggagaattgcttgaacccaggaggcgraggttacagtgagcagagtttgcaccactgtactccatcctgggcaataaagtgagactctgtctcaaaaacaaaacaacaacaacaacaaaaaaaagtttcactagaatttcaggaggattaaaaaaagatacaygaatgcaatatttacaaagatagttgagaattttccaaaatgggtaaaggacattaattcttaaatttcaggaaacataatgaaccacaagcagaacaaataaagcctcattcagataaatcagtcaaaatatcacacaccaaagacagaaaatcttaaatataaccagagttgaaaagacagatttctggctaatgagtaacaatgagagtcattcattagaatgacattagaggtgatggctgacttctcaacagcaatacaggaaaccagaagatgatagaatattatcctcagagttctaagagaaaaaaacttttaacatataatttaacatccaatgaactatttaagatgatagaatattatcctcagagtactaagnaaaaaaaaaaaacttttaacatagaatttaacatccaatgaactatttttcaaaaacaaggacaaaataagatctaatagagaaagctatctcaggaaaggaacttctaagaacacatgttaggaagaagactgatctcaaaagaaatctctaagatatgaaataaaatgtgaattttcaaaaaataataactgaggctgggtgcagtggctcacacctataatcccagcactttgggaggctgaggcagaggactgcttgagcccaggacttcacgaccagcctggacaagacagtgagwcccccatctctacaaaaagaaaaaaaaaaagtaagaaaaaaattakcccakcatggtggcntgtgcctgtagtcccagctatcaggaggctgaggcagtaggattgcttgagcccaggagttcagtcgcatcactgcactccagcctaggcaayagagtgagaccttatttcaaagaaaaacaaaataaggtcactatgagtaaatttaaacaaaaccaagtgtatagaataaaaatgtctaatttgagggattattaaaactgaacaatcataacaagtaagccacaatgggcatggagttaaagcattttatagttatctgtgaagattctataacataagagtaactgttcatgttgaaatctcaaaatttatcattmagaaaaakagcatataacatctaaacagaaaaaactgcaatgagaaaaaaatttaaatcaattcaaaacatcaaaaacagagagagagagaaaagcaagacaaatggccaaaataaatgaaattttaaaaattcttagaactagccaggtatgatggctcacacctctaatcccagcactttgagaggccgaggtgaaagaattgcttgagcccaggagttcaagaccagcctgggcaacatacagagaccccacctctaaaaaaaatttaaaaattggccaggtgtggtggcatgcacctgtagtcccagctacaagggaggttgaggtgggaagatggcctgaccctgagaagttgaggctgccataagctgtgatcacaccactgcattccagtctgggcaacagagcaagaccctgtctcaaattatttatttatttatttatttttagaattcaatgataatgaaagtatcagatactaagacttgtgggatgtagctaacacaggactcaagtgcttaagatactggttttggtgggcaggtggggagaaagaaaggtttaataagcccaaaaaaagtagtagaaagaagtgaataataaaaacaaaaccataaattaataaaacagaaaacaaaggtacaacagaagataccaatgaaagtaaaatctggttctttaaagagtaatagggctgggcacaatggctcatacctgtgatcccagcactttgggaggccaatgcaggaggatcgcttggacccaggagtttgggactagtctaggcaacacagtgagaccctgtcatttcaaaaaataaaaaaaaaaattagccaggcatggtggcacacacctgtagctccagctacgtgggaggctaaggcaggaggattgcctgagcccagggaggtcaagactgcagtgagcctagatcgtgctactgcactccaggatgagcgacagggtgaggccctgtctcaaaaaaccaaacaaacaaaargaagtaatataattgacaaacttcaggtaaaaataattgggggaaaaagagaatgcacaaacagtattaggaatgaaaaggaggacaaaactacagatataacaggggtcaagaaaacaagraaatattaagactttttgctaatatattgaaagcttaataaaaattttcttagagaaaatagcaaggaacaaaaatttattcaagaaaaaaatagaggtggccaggtgcattgcctcaggtctgtaatcccagcacttgggaggccgaggcaggtggatcactggaggtcaggagttcaagaccagcctggccaacgyggtgtaacttgtctctactaaaaatacaaaaattagctagctgtggtggcatgtgcctgtaatcccagctactcgggaggctgaggcaggagaatcacctgaacctggaggcaaaggttgcagtgagccaagatcacgccactgcactccagcctgggtgacagagacagactccatctcaaaaaaaaaaaaaaaagaagaagaagaagaagaagaaatatagaggagcttctggactggcaaatacattaaggtgctgggtaagtccaaggaaagcatagcagttctgcacccacccctacaccttttgcacctctcttccatttggctgtttctgagttgtatcctttataataaaccagttagcaataagtaaagtgctttcttgagttctgtgaatcattctgggaatttatagaacttgaggggttgggggatggtgttggggaacccctgattttgtagtcatccaagaaaaaatgtatgtggcctggtgctacggtttggacatggtttgttggccccaatgttggnggtgaggtgtttgggtcctgggggtggatctctcatgaatggctttgtgccattctcatggttgtgagtgagtagtttttcactcttactttccatgaaaattggttattgaaaagagtctggcatctccctcctctctcttgcttccttcctcttgccatgtgattctggctccccttcacctcctgccatgagtagatgcttcccaaggccctcatcagaagcaggtgctagcacatgcacagaactgtgagccaaataaacctcttttatttttctttgagacagggtctcgctctgtcacgaggctgtagtgcagtgacataataatggctcactgcagcctctaactcctgggctcaggtgatcctcgacctcagcctcccaagtagctgggactacaggcatacactaccatgtctggctttttttttttttttttytttggagatggagtttcccttgttacccaggctggagtgcaatggtgcgatctcggctcactgcagtctctgcctccagggttcaagcgattctcctgcctcagcctcccgagtagctgggattacaggcatgcaccaccacgcctgggtaactctgtatttttagtagagatgaggtttctccatgttggtcaggctggtctcgaactcacaacctcaggtgatccrcccacctcggcctcccaaagtgctgggattacaggcgtgatacactgtgcccggccttatttttaatttttttgtagagacggggtttcaccatgttacccaggctggtcttgaactcttgggctcaagagatctgcctgtctcagcttcccagagtgctgggattacaggtgtaagccactgcaccaggccaaacttcttttctttataaattaaccagcctcaggtattttayagtaacacaaataaaccaagacacctgatacctcatttgtggctggcatcagaagtgaggacagtcttgtgagaatgaactcttaaacctgtggagtctgacattcagttaggaatgaattgaactgttgggcatccagytggtatcacaaattgacaggtgttggggaggaaagactctctcacttggtgtcagaaaaactgagatttgttataacagcccaggctcatggaaacctgtggtttgggaagagggacaatgagagggtggggaattaggaacctttaattcctgggtggccactcatgggatggagcagtasctgtgctgagaccatttactgaaggtaaaagtaactaatggaatttagagatgaatccacctcccagggagtgggattcactggatatataaggaaatgcaaaccaacagaaaaaagttaaatataaaatcccttggttattgttctatgtaaaagctaaaatgaaatttaaaagagtgctaggtcaaccttgatgctggaccaagctcagatttctgctggtcagggcgtgacaactagcctcaaagccactcccaacgggaaaaattatgtggaaaccgcctgggcatttcctcaccaacacccttaggtattctgtagtttcttggttttgtggttcccccatgtggagtacctttctggtgaccagagatcttagagacactctttgttgtttccacataattttgttgtgtttgagaaggagtctcgctctgtcacctaggctggaatgcagtggcatgatctcagctcactgcaacctgcaattctcgggcctcagcctcccaagtagctgagattacaatcgcacaccaccatgcctgtattttttttttttttttttttgtagagacagggtttcgtgatgttggccaggctggtctcacactcctgacctcaagcaatctgccacaagggaggtagagatggagtttcaccatgttggccaggctggtcttgaactcctgccctcaacagaaaccaggggatagtatgaagtctcattttatagataagtatcatccacttcctgatgaatctctgctacaggaactaatttcgaggcagtatctttatttttaaatgctgcagcgtggaagaacatgcttgggttgacacagggcccacagctcactatggaacaatcacagatggctatatgtgatccagacacaaaggtgatgattcagtcagaaatgaattgaactgttttatccaatccttgagggamcagccagtctcaaggactggataaaagctactcgaagtctgtttaccttgagaagggagactgcccaattccccctataaattccaagtggaacaccccagatgaagaagctgatatgctctgcacaaaagccacgcaggactggctttatgataatcgggatattcacccgctgaatacatccgttacccagggcaaatgctgcggttagggaggctccttttatgtgggcactccatgtaactttactgcttcaaaatctaacattacgagaagccttattgaatttgctatctcagcttactctcatcttacagatgctaataaaaacattaataatgagtcaaaggactcaacccagcagggtggaaatttttaagtgtctattaagaaatagggtgaataaaacagaccttgatgggactgaaacaaaagtcttttttgagatggagtcttgccctgtctcccaggctgcagtacagtggcacgacctcggctcattgcaacttccacctcttgggttcaagcgattctcctgcctcagcctcccaagtagctgggattacaggggcacaccaccatgcctgcctaatttttgtattttcagtagagacagggtttccctatgttggccaggctggtctcaaactcctgaactcaggtgatctgcccacctcggccttccaaagcattgggattacagacatgagccacggcacccagcctgaaatgaaagtcttaatatagcactaccaaaggttgcatggactataaggaccctcagatggtttcccaaaattaaagggctcaaacaaatctgctctatttgccccagcacagagaaatttaaaatgtaagaagggaaagattacaattagaaacatgatctggaattgcttggggatatatagtaaggtaaattaatcaaaataaagactcacaaaagggccaagataccttgctgaacacccaaaacctaatgcacaggagtgggtcaaataatcaagggatggagaagtttctgggactcatttgagagccttatatgctgttgcaccaaaatcttctagtgaagtctttttaaaaaaaaaaagatagggtctcactgtgtcacacaggctggagtgcagtggcacaatctcaggttactgcaacctccacctcccaggctcaagcgatctcccacctcagcccctgtagtagatgagactacaggtgcacactaccatgcctagctaatttttgtattttagtagagatggggttttgctatgttgcccaggctggtctcaaactcctgggctcaagtgatcctcctgcctcaacctcccaaagtgttgggattacaggcaggagccattgcctcaacacagtggcttacagccttaacgcaggctacaattagaatgataatatattaaagtgttaaggttgataggattaaggaggaagtttgaatgaaattggaatgtttaaacacactttatctaaatgttttatgggagtggatcttaggtttgactgtttcaccccatttctcctacctagtacagtaaaacagagggcacagtgtcaatctacccttcaagcattattaattggacatgctaaatgggaatgaattagattgcctgagctcacgcagtgtagaaccgagaagctggagcactggtacagacaaattctctgtatgtggagtgtgggctagggcttatgtcgaaagcctgcgagtgcctcccagtgacaactatcagggtgctggactacagactttccatttcagaggcaactactaagtttgctattggatattgatttaaagtgcccctatgactgaaggacataaaacaatgctgaaacttgaaatatccacggtatctaaggcgattttggaaaaacactctaatgggagaggacagtgcccaaaagagwtccctattgaaaaagaaatggtttatactggatcttgttaccagaggaatgcaaggaagagattctcacatatagggagcctctttttcccttggactgactttggaactgtaggagaaccttctgcatttaattgtcacttggacaatgccctataaatacctctcagttgaccagcaaagtactgtttggtttatggatggcagttccaaggagaactatgatgtccacttgagcatgcctagcaatttgtgatgagaaagctcccaactttttcaagaaaactttaagtagcttccaccttctgacaaggttaattcacatacaactcaaagaggaatgaaacgaacagagggatggcagacaagcactgcaaaggcacacaggcatgcagtgtggtgtgggtagtggtttatttccactatgaagaaccaaaggaggtaagcaaggcccaaaaatgtttcttagacttcaattattggtatcaaaagttagacaatggtgtttaaattccccttttattcttccactagttctttgaaaaaagaatcatactctgattttcatactgtgctgctccaggtatttcccagttgcagaacaaagtgcccatttctgatctggggtcctagaaaagagccttcacatcctgggtacattttctctacttagaatttctagctagttaccactgcaaagtgacagtgatatatgcatttcctaaataacagattgaattggtttaaatgggctgtggatcagaatttcaaatcagtctagaaggacattttcatcactgaaatccacctactttgattcactttgggttttcatggtaactcttcagcacaygcaatgtttttaaatttatggcatagctttatcagtgagtaagaaatgaagtatcacatgttattaaaacccccttaacacagttaagaagagtaaaggagggcacccaagtacaaatcaacataaggacacctatttcattcatttaactgaaatatttttctctaatagaagagacattgtcaatattaaaatctagatttacacagcgctttcattttatactctacaattacttcgcatgacacctttacaatagacccacagaatgagttaatcatttaaaaataaatattgagacagataaggagaggttaagtgcagtgcccaatacagttaacacagtggttaagcatctgaaaaaagactgatgaaacccaattcttagtagtactacattacttactagctgtatcatcttgggcagattacttagtttccccaagcctcaatctcctcctcaacaaaaaatgcacaacagcactaacycactgctgttgagaggattaaatgtagggaaaagatccaaaatatacaatgcctttttgtagcacaattcctaacatagagtgattttagtgaatggttataaatttactgtatggcaattttttggggtatgtcactttaaattttttaaaaatctagctctataatctcaggattcactctgttgttctcggcatacagattacaaaaaaathgagtataaaaccatatccataaatgcttattcttcttcatttgaaactgaaataaattggtagatattaatgagctaaaactcctgaacagactccacaaaccaaacaggacaagctaagcagtggctcacacctgtaaaccctacactttgggaagctgaggcaggacgatcgcttgagcccaggagtttcaaaccagcctgggcagtgtagtgagacttcatctccactaaaaataaaaaacattagtcaggtatggtaatgcatgcctgtagtcccagctactcaggaggctgaggggtgaaggttgcttgagccctggagtttgaggttgcagtgagctacgatcatgtcactgcattccagcctgggcaccagagtgacaccctgtctcaaaacaaacaaacaaaaaaagagcagaaataggagagctcaggacagaccacaaacggtgagacataacctgctacttaaaagaggaggtgtgggccgggygcggtggcttacacctgtaatcycagcactttgggaggccaaggcaggcagatcacctagggtcaggagttcgagaccagcctagccagcatggcaaaacctcatctctactaaaaatacaaagaaattagccaggcatggtggtgcgcgcctgtagtcccagggacttgggaggctgaggcaygagaatcgcttgaacccaggaggtggaggttgcaatatgctgagattgcgccactgcactccagcctgggtgacagagcaagactccgtctcaataaaaaaaaataaaaataaaaaataaaagaggaagtgtgataatggaagcttttggrktttttttttgccttctaaaaaaagcatggtatacaatataaaagaacatttattaggttctcaactctggaataaactcttgactgtatcatttaaaaaggttttatgttaaatgtagtaatatgttgaaccttcacaacttagagataagtgtaatttatagaagattatatgggactaataaaactagtaattattataatagcatcagctatcatttagtcagtgtcaattataccctaagtattttatacacgttttcttatttaattgtcataatagatcagtgagaaaggagaaaaaaaaaaaacccaaactattatccctatagagatgtggcaactgtcacacaggaggattacctaactcgcccatgggtatagttaataaatgacagagtagacatttgaacccaggattgttatgacttcaaaaaccaatactctaaaccaggcatggtggtatgtgcctgcagtctcaactactcgggacgctgagatgggaggatggtgtgagctgaggagtttgaggctgcagtgtgctaagactgtgcctgtgaatacactgtactccattctgggcaacacagtgagaccccatctctaaaaattaaaggcaaaacaaaagaacccacccacccccaatattctttctaacccaaattgcttctctaggcagaacataaataaattgaacttcaagattcaagaaaatggcctttaagatttcttctaagtctagaatacaaagttctttttttcggccaggcacagtggctcacgccggtaatcccagcactttgggaggctgaggcgagtggatcatgaggtcaggagttcaagaccagcctgaccaacatggtgaaaaccctgtctctactaaaaatacaaaaatcagctgggtgtggtggtgcgcacccatagtcccagctactcgggaggctgaggcaggagaattgtttgaacccgggaggcggtggttgcagtgagccaagatcatgccactgcactccagcctgggcaacagggcgagactctgtcttaaaaaaaaaaaaaagttatttttttctaatgggctaaaacaccataaggtattaagctccaagcctctgccccttctagccattctctaatccctactccattcagggaaataaaaggaagaaaggaagagagaattacttaaggtaaaatttttcagatacaaaaaggtgatctgtaagtaataatggaagcagtgagtcctcagcttctgctggtsggaaggttcatgctgaatatttagcaggcgctctctctaaagagaacagccaccacacttatggcagggactttgctgtcagtagctcaagaggcaaaatgaactacagactgggacaaaaggtgtgaagtctctcgtttacatagattggattcatcacaaatttaccaggtcaagaattccatataaagsgtttcagccttcacttgcagatcatgaaaaatatgacggagatccacagaatcctcagaaactgcatattgttaccagaataaaaaagtacaaaaaggtgtccatattgggaaaaagacataataaagatgctcagattagaaaacacacatatccatcaagttcacaagcatattgcttcagtgaatgcaaaactgaaagtggtttaacagtcagtaagaatcaagcccctgaagttgccacaaggatttccaactgaggaggacatgtctaagctctgcctcaagagcactggggaattagtgcagtggcatctgaaatctgtggagcagaaagcaattaactcctaatgcccaaggagcttcagattaaaaaatggattttttttttatctaaagatgatgagaaagtgtttcactaaaatatattttaaatatatacatataaaaagaaagtgggtgaaagaagaaaggaaagaatttagattggtcattagagaataacttcctgacaacaaaaattgagacatgaaacacattatcaaagaacattatgttggataaactgaagaaaatacaaccttgtgaacggctgtcaacacacaaatagtgtcaacatacacacaagatggggaagtacaaatatagtctacttggctcagccccacttataatttaaaatagaaaaataaaaaaaggaaagtggtaaaataagcttgacggcaccagtcgggattgcactacaattctgccagcttaaatacaagttagcaaaatgctaaccccagttgggtgcaatgcttcatgcctgtaattccagcactttgggaggccacggcaggaggatcatttgagcctaggattttgagagtccagggcaagacagtgacagtccgtctctacaaaaaataaaaaattagctgatgcggtggcacattcctatagtaccagctactcaggagggtgaggtgggaagacagcttgagcacgggatgtcaaggttgcagtgacccatgattgcactactgcactccagcctgggtgacggagtgagaacttgtctaaaaaaaaaagtgaatccaaatatttgtgtaaccttttttgaagaatctatcagtgtacaggtactattttataatttccttcaattcactatccattaagacatagcatctctattttctctacacattcatattcagatgacaactagtatcctagtctaggctcagcattagtcttcacaaaygtactggtaaaataaaatccatagtttgttattttcttaatatgtgttggaagaactttgaatgaaagataccacaaagataacttccttctgagattaaaaaacataaacaaaaaaccacacacacacacacacaactctggcagaactgttagacctgggaaagtcatctgtctcatgcctgctcaccttttctctcactcagatgaaatgctcccacaggcaaagatccaaagttgattgcctcaggaagctgcagagtcaacaatttcatttatcccttttcaatgttcgctgagttttgatgtgaacctttactaatccataaagaatgggaagtctacacgtttctggtagtaacagagttctctcactctcattatgatgaagaaaaaatgttttcttaatgacgattatatattatcaggaaaaaagggctatttccattaataaataaatayacccaaatcagccaagttaacacttgtgttccttcctatttctctctgcagtcactgactgccacctcaaagagaaacagcagtctcatctcagccrctggtcccaccatacctgctccctttacacaaaacagaaaagactgtgatcattattcggttctaataatayaccccatggaaacacagtagttgggagcaaaagtacttgtttttggaaaatgtaaaatccaaggaaaacctaccttgtgagtagagaaggatttgcatctctaaaagaacacaggtaaacacctgcaccaggttctctaatcccaggagctcaaatgcctcccgaagggggtaatcagagagggggagttcactgggcccaggcctctggcagatgacaggttcataaacaccataaaatttcagtgacctccctggaggtggaaggggtacttcataaagaatattgtggatatagctttcaagtggcaagggtggtggctgctgtgaggtaacagccttgtaaagctggataaggaatttcttgcaggcctgcatgaatggtaacggtgtgatcaagcatatactttttgaaacatacagggtgtctctgctaatatcataggagttgtatcgctggagtttcaaaagggaagttgtatctccttcatcaagactacttgccaatgagtccatactgcaggaagatgaagcatacacactgctgtaatgctcagcgttgtgcatctggtaaagtgtctgcattgctgtgcagatttgcttacttgtaacttcttcataaaaagtgagaacaaaaccataggtgcgagaaccatcttccctggtaatkataaatgagtgaaactgggggtctttattgtccgtttgtgtcctgaaagatagccctttaggcatgcacaactgtgaaagaaagaaaaaaaaaaatcagaatgcagtacacaaataacttcaagccagaaataaatgttgtttttttaacataacaggattcaaaaagacaggttttatccagatttaatattcgcaatagccttaaattagaaatatattataaattcctcatacacatgtatataaaattattcttaaaaggagtatatacaagggaaaaacttttactgtgtgatgttacatgcaaggggctttactaagaacaagagaatcactgatttagtcccagagtaaacctctaaccaagcttgtggcctttagcaagccatataacttctgtgagcctcagttcctttatctacaatagttgctgtatcaacgacttgaagacagagtaggcaaaagcatttcacaaatattaaaaagcacttcacaaaaatagtactcaagtatttaatacagggaaataggaaaaggctcatttaggaagtggaaaaaagttaaacaaagaataataaaaacaacagtgtcatctttgctattttgaatagtatggtattttatccaagaaaaagaaactttggaaattgaaagctttttgatctactaaagcagaagcacagaaacaaggcattttagattacttctagtagagattatgctctagttcttgggaactacccaggattgaggaaacttgagaacaaaattacccagaggagctaaagatgctatatttaagacacttaaaatgcacagaaaattagaattgattctttaaaacattttaaataaaagaagtgaaattacagaaaagttgaaatatactaaggaaaacagaacttgtaattcaaccatcctaatactcattattcatatttagatatttctatttttgtattgcaatatgctttttacatagaaataatttaaccatatattattactatttttctatatttaataactgatgtggtacaaaatttagactgtctcccacatccccacattaccaagaaaatacaattcctttatttcttcattcaaaccgtcaaaaaacatttattaagtgccttttatgagaggggccctatgatacaatggtgggaaggacagacatggcccatggtcctatggtatttccagtcgagtaaggttaacaggtaagttttaaaaatcataaactataaagtaagggaagtgctatgatagggtaaataagggttgctatgggaaaaacatataatagtaggaagacacacattagaaaagraggagctaccaggaaaaaatgaagcccaactgaaacctcaggacgagtataggtcttagtggataaagaagattccaggcagagaggacatgtgcaaaagcccagaagagtttgaggaactgaacaggtcagtgtgggtggggcagagaatgcaaggtgggaggacgtgagagaaagcaagagaaataatcaggggctagcccatgaagggccttggtaggccatgttagaactgtggggaggacaatgggaaacctctgaagggtttttagragagggacagaattagaygtgcctcttagcacatccatcttggaacactaaggggagtggttttcaaaggggttccaaagaggcagcaggaatgtctcagggccttggaagggagtgagaggctagaggaagaagttgagagggccagtgtcccttcttcccctatgcacattccactttcatttattctgtagagtggaattctttcagtgttaagatttctgggttcccactgcttaaaaacaaaatcttgatggtgggataggattaatgcaacacaattgtcattaagcatgaaggcgggtgggtgtccaaactgctcctcacagccatttcagattgtggtcctttcctttaccctaaaaactattggctttgaagctcatgtcatgattgtgccacattttgggtttcttttctatccaagttcatttccagagcaacttcttccatgattttaaatatactctttcaactcccaaatctacaatctcatgaacctgactcttaactgagtaactacttgacaatcccatcaagatgtctaataggcaactcaaacttaccatgtcccaaactgaagttctgatttcttcctccaaatcagtttcttcttatatcagtcttttctgtaattccatccatctaatttgcccaggacaaaaaccttggagtcatctttaacttcttcctctctttctcacttaccccattatccaatccatcagcaaatattatcaattctatcttcaaaaatacatgcagaaactaattgctgttgcttctttttttttttcttttttagaggtgaggtcttgctctatcactcaggatgaagtgcagtggtacaatcacagtttactgcagcctcaaactcctgrgtaaaagcaatcctcccgcctcagcctcctgagtcagaaagtaattgttttgatctttacgcttaccactctaatctaagtcaccctcttttcttgtctggatgtaacagcctgtttctgcccttgtcccccataatctatttcccttataagagccaaagcaatccttaaaaaatatgttagatcttgtcactcttgccaamattctccaatggactcttatctcactaaaagctgatgtccttataatggcctgcagggaagccctgcatgactcagcccccaacaacctctctgccctcatcttatactctctaactcacccactctgctccagcaacaatggcacgttactgttctatgaacacaccccgcgtgctcccatcaaaatctgctcttcccttttccagcagctttcttccccttggtatccacatgactcattccttgtggcagatatagctccaataatatttctactttcacacactcttccaaaccttgacacttccccattaagaagtggagctcactctccttgaacctgggtgggctgctgagagtgcctataccaggatctgggaaactttttctataaagagacagataagtattttaggctctggaggccattacagtctttgtcacaactgctccactccacattgtattaggtgagtgcaaaagtaactgtggtttttgcattgttggaatttgccatttgacattggaatacactttttaaataaatgtggttatagtatacatcttttttttttttttccaagacggagtcttgctctgtcacccaggctggagtgcagtggcgcgatctcggctccctgcaacctctgcctcgcaagttcaagcaattctcctgcctcagcctcccaagtagctgggattacaggcgtctgccactgcacctggctaatttctgtatttttagtagagatgggtttcactatgttggccaggmtggtctcaaactcctgacctcatgatccgcctgcttcgtcctctcaaagtgctgggattacaggcttgagccactgagcctggaccatcattttaakgggcatttctcgctttatgtttttttgctaatgacttattacttgctgtttattttagattttagactgaaaatgttagacaaaaaagcaaattagagcagttttcttttcttttctttttttttttttttttgagatagagtctcactctgtcactcaggctggagtgcggtggcgcaatcttggctcactgcaacctccgcctcccaggttcaagcctcagcctcccgagtagctgggactacaggcctgcaccaccatgcccagctaattttgtgtttttagtagagacggggtttcaccatttttggccaggctggtctcaaactcctgacctcaagtgatctgcccgccttggcctcccaaagtgctgggattacaggtgtaagctacccgacccggcctcgagcaattttcttattcaagttcaaaatgggtcgtaaagcagtggagacaaccacaacatcgacaatgcatttggcccagggactgctaactaacgcacagtgcagtggtggttcaagaagttttgaaaaggagatggcagccttggagatgagragcatagtggctggccatcagaagttgacaatgatcaattgagagtaatcactgaagctgaccctcttcagcaacatgaaaagttgctgaagaactcaacgtcgaccattctatggccgtttgacatgtgaagcaaattggaaaggtggaaaaactcggtaastgggtgcctcatgagctgagtggaaattttaaaaaatcgtcatcttggagccaggtgcggtggctcatgcctgttatcctagcactttggaaggctgaagcaggcggattgcctgagctcagtttgaaaccagcctgggcaacatggtgaaatcctgtctctactaaaatacaaaaaattagcagggcgtggtggcatgcacctgtagacccagctactcaggaggctggggcaggagaattgcttgaacctgggaggcggaggttgcagtgagccgagattgtgccactgaactccagcctaggcaacagagtgagactccatctcaaacaaaacaaaacaaaacaaaacaaaataaaataaaagcatcattttcaagtgtcgtcttctcttattctacacagcaacaacgaaccatttctcaatcaaattgtcatgtgcaacaaaaagtggatttcattagacaaccggcgatgaccagcttagtggctgaacyaagaagaagctctaaagtacttcccaaagccaaacttgcaccaaaaaaaggtcacggtcactgtttggtggcctgctgctggtttgatccactacagcttcctgaatcctggcgaaatcattacatccaagaagtatgctcagcaaatcgatgagatgcatcaaaaactgcaaagcctgcagcgggcactggtcaacagaaagggcccaattmttttccacaacaatgcctgaccgcacatcacacaacaaatacttcaaaagtttaacgaattgggcyatgcagtcatgcctcatccaccatgttcacctgacctcttgccaactgaccacttcttcaagcatctsgacaattttttgcagggaaaacgcttccacaaccagcaggatgcagaaaatgctttccaagagttcatcaaatcccaaagcacggatattttacgttacaggaataaacaaacttatttctcattggcaaaaatgtgttgattgtaatggttcytattttgattaataaggatgtgcttgagcctagttatgatttaaaattctgtccaaaaccacaattacttttgtaccaacctttaaacacgtaagtatggytttgttccaacacaattttatttataaaaacagtcagctggacagatttggcctgggggccatgtatgcccacccctggcctagtcaagtaaaatgcaacagcagtgacaagtgacagagtgacttttgagcagaggctaaaaaaggcaatacagcttccatctcctctctctctctctctctctctctctggtaacctggtaacacactctgggagccctgaggcaacatataaaaagtttagctagcctgaagctgcctgactggtgagaccaaatgaaagaccacacagagacagaaggagccctagctatatgcctggtccaggagacaggcctgtgagtgggtgagctttcagatgatttcagtcctcagacttcaaaccttccaaactaacaccaagtagaatacaggcgcagccaaccaaaagctacctacattgcagatatgtaggctaagtaatgattttgttgctttaaatcaagggtcagcaaacaacagccctgctatgggtttaaatatatgtgtgcctccaaaattcatatgctggaacatcacttcagggtgacggtattaaaaggtggggacttttgggaagtgattaagtcatgcaggctctgccctcatgaaaggattcgtccttcttataaaaggttgaagggagcagcaccctagtgctttctgccatgtgaggatacaacatttgtcctctctggagtacacaataacaaagtaccatcttagaagcagagactaggccatcattagaccctaaacctacagacaccttgatcttgtactttcaacctctagaactgtgagaaataaattcttattccttgtaagttactcagtctgaagtattttattttagcaggaggaatggagtaagaaaaacccttaggtcaaatacaatctgccacctgatctgtaaatagtttcactgggattcagtcacaaccatccacttatgcactgtctatggatgycttcacactacaacagcagagctgggtgactgtggcagaaactgtatgcccacaatacctcaactacttattatttggttcttcatgaaaaaaattgccaagccctattttaagccattaactggtaggcggatggattgtcatgcagcgatagataatcaaaatacttccttacttcccttaagtctctacataaatactaccttagagaggtcttcctttacctttccataaaaaatagtgttctcttcatcttttgcatgccataaaatgttactcctctaaaaagtatttattgtggagaagcaattaaagtcttgcaccactgtaaacatatgtacattatataaacatacacattactagtattgtataattctgtttgatctctacattgccagctactcaagggctagtacttcatttcaataactttaaacattcaagggaactgcaatggaataatataccatttggggccataacaggtggtgactgataacatgggtaaaaagaaaaaactgtgaagctcagcattagtgcaccagtgaaaatgtcttcatatttcatatcattgaatatgagatgtggaaaggactaaggcagatttactcaattcttttacatattaaattactatgtatatttggatagaatgagatatagacttaggtaaaacctatgaatacctggatttggtagggggtaaaagccacttaytcctagtcttaggaataactgtataaggaaaggctatggcagaatcttttaataattctacgttcacattaaggctgatttcatcataacaagttaatgagttgctctgctgatagcatgaataaaaactcatttggctgggtgtagtggctcacacccataatcccagtacttcgggaggctgagacgggtggattgcctgagctcaggagttcaagaccaccagcctgggcaacatgacgaaaccctgcctctactaaaaatacaaaaaattagccgggcgtggtgggacacacctgtagccccagctacctggaaggctgaggcacgagaatcgcatgaatccgggaggcagaggttgcagtgagccaagactgcaccactgcactccagcctagaagacagagtgagactgtctcaaaaaaacaaacaaacaaaaacaacaaaaaaccctaaaaacccaaaaacttcatttgacacatttattgtagtcaataaagattgtagaagggataatttgaattattcttgctccaggctaaactcaaacttgtttagcacagtgcatggcatataacaattggttgaatgaataaatgaatgaacaagaaaacaaacaaaaacagctgggggtaaagcaccaggcttagttcacctcttgatctggtctgtaattctttttttgtctttttggagacggaatctcactctgtcgcccagtctggtatgcagtggtgtgatgtcagcttactgcaacctccacctcctgagttcaagcaattctcctgcctcagcctcccaagtagctgggattacaagtgtgtgcgattataggcgtgcatacccggctattttttttttttttttgtacttttagtagagacgaggtttcaccatgttggccaggctggtcttgaacttctggtctcaagtgatccactcgcctcagcytcccaaagtgctgggattacagtgtgagccacagtgcctggacttcagcttgtaattctttttccatcaagtaggcaatacagaaacatagtgaccaccaaagtcaacataaagatttaatttaattgataggcgttcctgtcatcctaaatcacaaaatcatagctcaactgctgttgaacagctgccaaatattcccttaagggtttgtagctttcttgagcgcacattcaaacatttacagaaaaagcttgccaaaagttgtactcaaagtgaagaatggctttctatgctacagacaacagatgtaagaatttttcctaaatgctcttccaacaaatcaaaaaaagtaagaactatatatctaatcgggaaacatgaactgcaaaatgctattatttttccatttttaaaagatatacagtaytgttttatatcaggaactacaagatactttctcagaaaacctgagtttcatcagaattgttaaactgtcaggaactacaagaaatctcagaaaacctgaaatataaatcaagatttgtttatcacggtattaaacatttctaattaacccttaactttgctatctactaacaataccccctcaccatcccacaataaaacaactaaaaattagaggtgtcactgatgatcagaytactactagtaaccagattactttagccaaagcaggcttataatgacaagtgtgtaactttcccagtttgagtcagcaaatgttcttatatttctctagaccgtttcaggcagtttggctagaattttaaaattcctttttccacatcttgtagttctatgacttccatggcctctccctcattatgcaaatacaatcatatactgtataaccacactctggtcaacaatggactgcctataggacaacggctggagcaatacgttataccatataacttagaagtatagtaggctatatcacctaggtctgtgtatgtgtatatacactctatgatgtttgcacaataaaatcacctaacaacacatttctcagaatgtctccctccctccctcccctcttctctccctccttccataaacacttattttgtcccatgttttgcattagatcttggtaactcaaaagacaaagataaaaataatcctttcctttagggagttcacagtctagtaggaaagacagacacagaaaccagcagttaccaaaaaaatgtgatcagtgttgctacggactctgttcgagatatcataagaaaagacagagtaactactcctgcttaagagatggttttgcagtggaggtcacacctagtcaaggacagggaagagaagtattgtaagcaagtatcacttcatttattcaacaatttgaacatctactatgcgcaaagctagggatataacaatgaataagagacactgctcctgttctcatggtgcttacattaagcacgagatacacagttgactactagctaagtaattggttaactgcaactgagataggtgctacaaaaaggtatacaaggtactaagagaacctaaggtgacctgagtgctgggaagacggtggaaggtgatggtcaggagcagcttctctatataaatgtttacagtgaagtctgaaggaatagtaagaattcactaggtgaaggagaggtggaagagccttccagagagaaggaacagcagaagcagaagctatagtatgaggaatgaaatggacaggttactgcaggagtccaggtaagagatcttgatggtttggaccaaggtgagtatacggaacagagagaagtagacagataactgattatatatgggagagggtgagtaagtgagaactttcagggtgatgtgtacattgttggacttggcaagtaggtggatggttgtaccattcactgacaaaagactggtgggaygaataatgaattcagttttggatatgttgcatttgagatgccagtgaaatattctagctgcaatgttaaggaaacgggsgagaggatgggggtggcgggggcaaaagggtcttccagcaatggtcctccagcaatgaaagccccattcctataattttactgtgagatatggctaggcatcgtggatcacacctgtaatcctagcactctgagaggccgaggtgggcagattgcttgagtccaggagttcgagagtagcctaagcaacatagccaaaccccgtctcctcaaaaagtacaaaaattagccaggcgtggtggtgcacacctgtagtctcagctacttggggggctgaggtggaggatcgctagagcatgggaggtcaaggctgcagtgagccaagattgcaccagtgcactccagtctggatgacagagtcagaacctgtctcaagaaaaaaaaaaaattttattgtgagcttgaacctaaacttggctcaaaatgagggcttatcttcattctaatgtcaaacctatgaatgtaatttgggattatccatttcaaattcaagtaattgctaagtctacaaaaagtatatatagccctttttccttttactcttacaagataagcatctgaataggtttcttcagccaacctttcaccgtttactctttgctcttcattccactatatccttctttgtaatcaaagttaacagcaaattataaagtaagagctttataatagttattactcttttgttacctaaaatatatttatgatgtttcattaggacagacataaaaaatagaatccttatattttcatacagtttgcttaaaagttattgaccaygttttcttcctatgaattcttaggtacaacacaggcttaaagataagatctatcaactagaatattacatagtcatggatgccaataagcagattacctcaaagagatgtgaaagtggggtgggggaccttcagctctgtttgcaatgctttatttcatttaaaatgaaatgcagaccaggcacagtggctcacagaggtcgaggcgggcagatcacttgaggccaggagtttgagaccagcctggccaacatagggagaccccgtctctaccataaatacaaaaattagccaggcgtgatggtgcgcgactataatcccagctactcaagaggctgaagcatgagaatcacttgaacaccggaggcagaggttgtaagtaagccaagattgcaccactgaactgccagggtgacagagtgagactgtctcaaataaattaattaatttaattaaatgtactgcactccaatctgggagacagagtgagactgtggaaacaagggaaagaaagaaaagaaagcaaagaaagggaggaagggaaagggaaaggaaaggaaatgtagagctctgaagcaaacatgtcaatgttgacatatgttagttctaggtgattaatacatacattgactgtttattgtattgttctttctgttctgtgatatttactttttttcataaaaatctctgatcagcaactgaggaaaaaaaactaattcaggaattatttcacctgtcacttgtatttattttctattttatttgcactgtactcatacacattaaacattttatttaacaaagttcactgctttgggtacttaatttatgtatgaaattaatgaccttttattcaaagcactactgttgttagaggaatgactaatattacagaaggtgatgactcactgcggtggaattttgctaaaggcaagacaaagctttatatctttaggtgggaataaattacagcttcatacaaacgcacttactagtaaatcaaagaggaaattaaaggcagtaaatctgtgacccgaatgcaaactactttaatgggatgcttttcagagattttccaggagtacaagcaaatccttttagatttgcagcaataaaaaaaatgctatgtggtgcttaaccatcaaaacacagcctttgcgattattcttcagggggaaacttttgctgcttacataaaataacctcaggggcaaggagtaaagaaaatatcaaagatcaaggaagctgataattactttaaagattaatgttttgcagatagaggcaaaagctatcatggatatctcactattaattcattcaaatgattaaaagaaagaaaacacatgaagggtggcattttgttccaaatgactgtggattcatatagtaagaacgtacttgtacccaggccccagtgatcctcccacctcagcctccagagtagctgggaccacaggcatggtgccaccacacccagctatttcttttttaatttgtagagacagggcctccctatgttgcttaggctagaacctcactttgaataccattctgatttctcacagaataagttatattttgaaatatcttactaatttaagaagattaagtattgtgatctattcatattcttatccagttttccactgcttgatttaaacactcttttcctaaatgcctttctattaatttgctgcataagcagctcataagttatttttttgtcactgctgttcaactattttagtcagatgcttgtctggactcttccaagtcttataaagataactaacagttgtgttctacataatatctatagtagagtcttcaccaaagatgacgctaggcatctacaatattaacttccagcaaaatggcatctctgattattttagtattgtataacagtttaggaaaataaccacattgtactctgtaaggaatcaaagtcaaagtgccaagtgctttaggcatttgtccttacaaatagcaccatgctatcccctccctagagcgagcccaggctggaaagagtttactgtgatacaaaaatatcacaaagggtccagtgtgacccataacatttccagtgtagatcaaaactcagttacacagtttttcttttgggaaggcagcaaggcagwtgagaaaaaaagtgagctagagagtaaaaatgatctggatttaatttctgagtcttactgcctaactttgggcaaattacttaacctttgaaaatataagaattctcactgggtacatgtaaacatgtatgtgaaaataacatacataaagtactctagcaggcatctagtgaatattaatttccttctgttagattatcaggttataatggagtcttttaacaatatctttaaaatactaaaaaagaggccgggtgcagtggctaacgcctgtaatcccagcactttgggaggctgaggcgggtggatcactagaggtcaggagtacaagaccagcctggccaacatagcaaaaccccatctctactaaaaatgcaaaaatgagccaggtgtggtgggatgtgctcataataccagcattctgggaggctgaaggagggcagatcacttgaggtcaggagttcaacaccagcctggccaatatggtgaaaccctgtctctactaaaaatacaaaagattagctgggcatagtggtgtgcgcctrtaatctcagctactcgggaggctgaggcaggaggattgcctgaacccaggaggtggaggttgcagtgagccaagattgtgccactgcactccagcctgggtgacagagcgagactatctcaaaaacaaaaacaaaaaccaaacaaaacaactcaaaaatagcaatggctatcactgtgtctcagttcacctttaatcatttctgtatcttttttatttttttcccattcttacgtatatacccaattcatttctatatctatcatgcctgctacctccttactttggggccccctgaattatataatcatagagtttatgaacatctcaaatattattcaggcttctaagaagagcccttcctaaataatctgaaaactatgacctactttatttctaagaccctctcaaggttgactatctctctatcttctatctatctatctatctatctatctatctatctatctatctatcyatccatccatccatccaccyaccyacctacctacctctacctacctacctacctacctacctacctacctattttgagacagggtcttgctatggtgcccattctggtctcaaactcctgggctcaagcagtcacactgcctcaacctcctgagtagctgggcttatagatgcacaacatcatgcagggataaaagagacatttaatcagcactggtaactcattatgaggcaggagaacagggtctggaggcagggaacctaaggccgattcatgctgactttctagaactaaatcaaaaggaaaaccccaactttccatgcccaagtagcaaaaggaccagtggctactccctttgtaccttccccctaccctttttctgcatgacagactaaaaactgaaagtacctctgattgtttccttcccacaaccaatcaggatggtcgtgggccaagtcttcatttgcataggagtgtaactttgtaacttcacttcagcctctgattggttgtatgtttgtgtagggtgtaactttgcttcagcttctgattgatatcctcccacaaccaaacagactgatcgtgggccattacttcatttacatagagtgtacactaagtaaccaatggaaaacctctagagggtatttaaacctcagaaaattctataatgggctcttgagctgcttgctcgggcctgctcccaccctgtggattgtaccttcatttttaataaatctctgcttttgtcgcttcattctttccttgctttgtttgtatgttttgtccaattttttgttccagacaccaagaagctggactccatccaccggtaacaataatacaaattcagatttctactgtacctaaataacgcaattaagttgcttttcatctttacaytgtctgtaaaaatgacarattataggcctaccatacaatattccttgaaacatgagaactgtaatcaggctctttccatcaggctcctctcaggccaataaagtaatatcactgtttatcaaagcttctacatattaatacaaatgcacaacacagtttaatagtaggaaactaaaatgggcttttaggatctattgtataaacttattaactatggaaaccctgggcaagtaacttgcttctctgagcttctgcttccagatctttaaaatgaggagagtatcacatttctttttttttctttttttgagacagagtctcgctctgttgcccaggctggagtgcagtggcgtgatcacggctcaccacaacctccgcctcctgggttcaagtgattctcctgcctcagcctccygagtagctgggattacaggcatgtgccaccacacctggccaatttttgtatttttagtagagacggggtttcactatgttggtcaggctggtcttaaactgacctcaggtgatccacctgcctcggcctcccaaagtgctgggattacaggtgtgagccaccacacccggcctcacatttcttataaaatcacttaaagaataaatgaaatgaaataaggtagacattcaaaatacagtcactaccttcatattaataaagtgaaaacaaggctaaagagtaaatgaggggaaaaaaaacacataccatgttcaccgcatcttgatcaaaagggttccattctatattctgaggatagtgggcgagaactttggatttgaatgttcttytcaaaggactctggtcaaaattttcgcctacaacaaataatacatagttaatatctwgaacttttccaaaagcatgtcatagttttctatttattttatagtcctactactgactgataatrttgagatctgattcaatttctgcctctaaccatctgtattgtaaaatcccgayggacaactaaaaaactgttaacaacagagcagcatttaaaacttcagaatctgaattttaaaatcctggctactcaactgatactaaaaatcaaaatatggtaatataatcattgytgtaacctaattatggtccacawttcagtgtgtggtaataataaactatatgaaaacatttacttcagaaaagaaaagtcttacattaagctaatcatatgtcttatgatcctaaaattttatacacacttagacccccatgctacagtgctcaaaggaagcaattttgcttgagtttccacaaaaatctctgagaaatgtgattgcatatccaggttctccagtaacaaaattaacagaattagaaacatcattgctgagtcatcctgtttagtagacagaacacattaaacatactaaccttttaaaataaatgagctatcctaagttaaattcattatctggcaaaattctggaaacataaaagtaggctacattttaattactaagaaaattcaggccaggcacagtagctcatgcctgtaatcccagaactttgggaggctgaggtaggaggattgcttgagcccaggaatttgaaaccagcctgggcaacatggtgagaccccgtttcttttcttcctatttttttttwaataaattttttaaaaagtaaaacattgaaaattcaataatagctatcagattagtttttttaacctcctcaaccagagtaattcccttaagacctattatccctaaatgttttagtttcatgaaatattttaaggtagacggatcttaaattcccaatgtcaaaaatttgggatcaaggaactagaagatcttgcaacaattttattgtgttgtgtgttttcctacttttagagttctaattaagtgcaaaatactagctgttacagcaaaagataaatgtcactttaccagtatttatactattaaaaatatcacaaagcaatttgatttatgaattgtatttgacttctagttagactcagtttctattttgggtaaaaatatgaaaaaaaaaaaccaccttggaatgcaaaacagatcgcagaaggacgaaaaagtcacactcaaaaatcttgctggagacaacaatataaaatacataggaatttttttgaacaaggacacataatttaaatayatttgcttaggcaactaaactactatttctaactgaagtccttggctaatgatcattattttctttagattcctctgacttatttaggcaaacatktcatctctgtatttttctactccatacttccatcttctaagagttgagagcattcatttctagaagagaaattgtcagacatccttaaggagagtttatcaatttttgcaccaagcttctagagtatgtaagcatcaaaaagtcagcagaggaatgtgaaactgtccatgagagtcaatgtggctgaagaacagattcagggctcagaactgatttcaggaagagtccatgatgtttttaagctgatgctagattttcctgtgaacactaagaattgtaaattattcacttcttcatttaaaaaaaagttacttggccagaatgtggtggctcatgcctgtaatcccagcactttgggaggctgaggtgggcagatcacttgagaccagcaacatagtgaaacctcatctcgaaagaaaggaaagtaagggggagcggcatggggagggtggagggggaggggcatggggaggggcagcggagggggcagggggggcaaggggagggggaggggcagtggagggggcagggaggggcaaggggaggggtaggggcaggggcaggggcaagggcagggggagggggcggggaggagaggggaggggagggaagggaaagaaagagaggaaagaaaggaaaagaaaagaaagatagattgattttttaggttacttttcatttcactttagagaaaaaacaaaattcctcccagttatagtctaagctgctgatagtgtactgacacagcaacagcgtaacttcatgatagccatcaagaaaccctctccttcacctaccctctaacaccagaaatacttgcttttattatccacaaatgtaaataaaatatgaaacactgcagaagcagaagaaacaagacataacctatcataaaactccttgcaacacttaccttttaattcagtcctgcctgtgtatagttaaaataacattatcttcattcatgtatcaagttattaatgggacaggagatatatcagaaaggtcatgaaagtgccattctcaatataattgttctgttaactaaggaacattgcaccttcttgacacacaaagaatcaacaagaaggaaaccacctccagaaagaaataattttacaaaaacaaaaaaagccacaaaacagtaacaaatctaacaaaagaaaagcaaaaccaccaccaccactgcttattagactgcttaaaaaaggggtaacaggaaagatcattgctatatatacacagctgtcttggcaaatatgatttggaaggatattaggggaagaactaactatgtagaaattctgatatcactgttaagaattcagaaatgggccgggcactgtggctcatgcctgtaatcctagcactttgggaggctgaggcaggtggatcacttgaggtcaggagttcgagaccagcctggcgaacgtgctgaaatcctgtctctactaaaaatacaaaacttagccaagcatggtggcatgcacgtgtaatcccagctactcaggagactgaggcaggagaatcagttgaacccgggaggtgggggttgcagtgagccaagatcacaccaccgcactctagcctgggtgacagagtaaggctccgtctcaaaaaaaaaaaaaaaaaaragaatttagaaatgactggatgcagctattcctactagcactggccaaaagaagagaatcttggtgatgacttttggggatgagagatgggggaacaacctatacttctcattttaaacacaagttttacctctaacttaraatttactgctgggraaaaaaaacaggaaaataaccaagtctaagaatttggattcccaggaaatgaaaaattacataagcatcctgtacttaaaatttaccttttaaatattatcttgaaacaaacaaggactataaatttgtacgactgctacaactacatatcaacttaactccaagtaacactgccaaataacctcctactaaattgaagctgcaattaatcctttcctcctaagaaagtaggaaatatctgccaagagagcttaaagactactgaatacatgttttcaaggcttgaagcaaatgaagtctttatgaaaattaagatgcagatgagagaagagaaacataaaataacatctacaagtctgaccaagcaaaactgaataaagaaacatttataatgggcttgcagtcaattaaaataatgatttataatagcccatccttgttcttaattttatttttacctgaagtcgtatttgcagcaccttggctcttgccatgacgatctgcttctagccattggtacaaaactacataatgtaacagaaacaaaaaagctttatgaacaaataaaaacaaacaaaaagcaaaaatgactttgaagaatggaaaatgagaataattaaccaaaagcaatcacacaggagacattaacattagaatgtagcttaacaccaatggaatgtagctgataagggattagtaatgaaagcaaagagaataggtaattttaacaaaataagtgaaatgctattaaatatctctaacaggttttgtatgggaaatagcacacatattctcttcttaatgcttacttaaagaggaatattaggagaaagctaatgcttctatagtcagatatcatacaagttgagtatcccttatccaaaatgcttaggaccaagaagggttttggatttctgactgtttcagattttgaaatatttgcattatatttacaggttgagcatccttaattagaaaattggaatactggcactcaaaaagttcaaattttggagcattttagatctcggatttttggattaggaatgctcaacctaaaaagtatgacagtaagactaaatgaccaactttaaaaattaaagagcatccctaattagaaaattagaatactggcctcaaaaagtttcaaattttggagtattctggatctcagatttttggattaggaatgctcaacctaaaaagtatgacagtaagactaaatgaccaactttaaaaaattacatcctggctgggcatgttggctcacaactgtaatctcagcacttcgggaggccgaggcaggtgaattgcttgaggtcaggagttcgagaccagcctgatcaacatggtgaaacctcatctctactaaaaatacaaaaattagctgggcatggtggtgggtgcccataatcccagttactcaggaaggccaggcaggagaattactkgaacccaaraggtggaggttgtagtgatctgagatcatgccactgcacttcagcctggatgacaaagtgagactgtcacaaaaaaaaaaaaaaaaaaaaaaaaattacatcccaaccactgcatattgattagaatggcttaagtcccaaaagctgactataccaaatattgacaaggataggaagtgacagtaattctcattcactgctgatgagaatgcaaaattgtacggccactttggaagagagtttggcaattccttacaaggttaaacagtcttatcacagaaccccataactccagtctaatcataagaaaaacatcaaattccaggaggagtaacctatagtatatctgataagtactcatcaaaactatcaaggacaacaaaaacaatgaaagtctgagattctgtcatagccaaaaggagcctaagtagacatgacaacttatggggatgggatacctcaacagaaaaaagactgatatggtttggctatgtcctcacccaaatctcaccttgaattgtagttcccataatccccacacaccgtgggagggacccagtgagaagtaattgaattatggggttggttacctccatgctgtccttgggatagtgagttctcacaaaatctgatggttttataaggggctttcccccacttcactctgcacttctccttgctgctgccatatgaagaaggatgtgtttacttccccttccgccacaattgtaagtttcctgaggcctccccagccctatggaactgtgagtcaattcaacctctttcctttataaattgcccggtctcaagtctatctttattagcagcatgaaaacagackaatacaagaatattaagtaaaaactaaagaaatctaaatagaggccgggcgcagtggctcatgcccgtaatcccaatactttgggaggccaaggaaggcggatcacctgaggtcaggagtttgagaccagcctggccaacatggcaaaaccctgtctccactaaaaatacaaaattaaccaggcatggtggtgcatgcctgtagtcccagctacttgggaggctgaggcagaagaattgcctgaacccgggaggtggaggctgcagtgagctgagaacgcgccaytgcactccagcctgggcaacaagagcaaaactccatctcaaaaaaaaaaaaaagaaagaaaaaagaaatctaaatagagtgtagactttagttagcaataatgtatcaatatttattcattaattataactaatgtaccatactacgagaggttaatgataggggaaattgtgtgtgtggggtgaggcaagtatatgggaactccattctcaatttttctgcaaatataaaaacaactttattttagaaattacattccagtatttaaggtaaaaacaccagcaacattatattcaatcttgccgggcgcagtggctcacgcctgtaatcctagcactttgggaggcggaggtgggcggatcacgaggtcaggagttcgagaccagcctggccaatatggtgaaaccccatctctactaaaaatacaaaaattagccgggtgtggtggcacacacctgtagtcccagctacttgggaggctgaggcagaagaatccctcaaacccgggaggtggaggttgcagtgagccaagatcacgccactgcactccagcctgggtgacagagcaaagctgtctcaaaaacaaaaacaaaaacaaaaaaaacattatattcaatcttataagtaatctaccttttataaatcatgtttatcaatgcaaacataagctgaaatttgctttatactgatatcccatttcgtcaataatattcctaagcataattataaagtgtcaactcttggaggaaagtttactactgtaacgacacaggctataacttagcagctttgaagagtgtaaaaacttctgaatgtcttttattggttactcagatgtctaaaactcagatatctttaaagagatgtcagagtctttcttttaaatagtcaataatgataatgtagggtaccaatggccaagagagcttgctatccacacccccaacgtttgatgatccaaggacagcaacaaatattaagcttctacgctggggggctacttacccacagatactgtgagaactgaatatcccaaacaaggtttacagaaacctttcatactctctcctcaacaaaaacaacaaagggctgagaaagctgcctacagaactgaactagrgtaataaaggaatcggtttattacaaatatctaagagaaccctgaaatcatcaaagtggttacttagatctctgaggaacagccagggctgtgaactgacatccatggtcatggatagatagctgaaagacctctgagcaaacatccaagtccttggttaagggtgccacagagggcacagaagtcagcaccctcctccagaaacacacttctgggagggaaacaattgttacatatgggactagcatgaaagaattcaagaaggagacctcaataattaaatatatactacaggtatttctcttccctttagtttacagggataacagctactcatgagaggaggagagaggggaattacactatgacacaaaaatctccccgttaggaaaagcaagcatgagctttacaattgacaatgaaggctgggtgcagtggctcatgcctgtaatcctagcactttgggaggtggaggtgggcagatcgcttgagttcaggagcttgagaccagcctaggcaacatggtaaaaccctgtctctacaaaaaatataaaaattagctgggcgtggtggcaggtgcttgtagtcccagctactcaggaggctgaggtgggaggatggcttgaacccaggaggtggaggttgcaaygagctgtgatccattccagcctgggcaacagggccaaactctgtgtctaaacaaacaattgacactgaaaatcacttccacaaaatgagatgcaaagtagggaaacaaatccattaactggtctaacaattttgcccagctcctatcttaagcctgtattttcccctgattaaggcagaaactcttggctatgttcaggttatcactaggaatatttaccaatagttccaattacttcacatagtcctcgtttccggttttatcagagaggtttatcatgtttgatttcatgtctcactgataaaatcatagtctgtttctgaccagagactttctccagaaaacaaagctaagtctcacactatttccctctcttcctgtcctgacaggtaaccccagaagcctagttttaaacaaaatcattaataaaatgagacatgaaagctattccaggtcaatttaaccagttatatagagaactacacataagcaaaaatcattttaatagatttacatattcaaatatttcatccttgcctctagattaccaaagtccaattaacttcagtttaaataattcagagaatttccagtgaaataagtacatctgattcaagtgcgctataacgtaaatcaccatttatataaagtttggactttaaagtctactttataggacatatatttaaacagataatgtataatttaaaaagaagtgtgactaattttttaacttaacatactagaatgtacatgggcagctctggaaatactgaactcctaaaatttctcaatctccataaaatacatgaaatatagcacaaaagttctgctactatgaatgtagatgatgttagaatgccaagaacacatctctcttcaccaaaggaatatgagatctggccttctggttgcttcacgcttcctctcagttggcagtggaaatagggaccccatccccagctcaaagttactggtagagatttctatagcatgcttgtggggttgcaaatgaagaggaatatttgagatttatgaaccttgggggctgtttttcagcctgatcatcatggttaaatatttcttcactcactctcctccctaaaccttcccactaggagggccccagtaagttacctcctgcactatccacttccatcatagcctgtttgtgaccagagactttctccacaaaacaaagctaagtctcacactatttccctctcttcctgccctgacagataaccccaggagcctagaagttttaaagaaaatctgcttctgggtgggggtcaaacgattagttcttgccaatgatatgtgggcagcaatgacgtcatttccgggtcaaggcacacaatctatctttcctctgccatctatcagctaaatgcaaaggaggccttaaaagatggacagttctcaaagtggaagaaagttgagtcactaaatatctttgtgaagtagagtgcctcccaccttggcctacattacactaaacgtgaatgagaaaaacttttattgtctcatgccactgaagtattatggggttgttattacagcagttagctattcatgtgtttactagcctgagtttttatttgtgttcgttttgactttctgactataatactaacccctgactatatcgtaccttctattggtaactgtctacattgcttgttacatgtttaaatacacgagtacagttctccaagtataagacagaatttgcctttttttttttttttttgagacagagtcttactctgtcacccaggctagagtgtgacgttgagatcttggctcactgcaacctctgcctcctgggttcaagcaattctcctgcctcagcctcccaagtagctgggactacaggtgtgctaccatgcccagctaatttttgtagttttagtagagacaggatttcattattttggccaggctggtctcaaactcctgacctcagaygayctgcccgcttcagcctcccaagtgctgggattacaggcataagccaccatgcccaggccagaatttgcccatttttaatgcatgttctccacctttcatagaaaaagccatatatcctactaagctatttatgaagaccacaggttctagcccatgacaagcttgttatcctttctaaacacacaacccccaaatctagtcagcaaacttgaaggtctagggtgatggtcatgaaaggaatcaaacaaaagaatcttggaggggtctctgcaaattcatcgactccattaaggaatattcaacaacacagaaacttaaatccaggtaatattaaagtttattttaattaattaattaattaattgtttttttgagacagagtctcactctgttgttgtccaggctggagttcagtggcacgatcatggcttactgctgcctggacctcccaggctcaagtgatcctctcacctcagcctcccacatggctaagactacaggcatatactctcatgcctggctaatttttaaaacatttttgtagaggcagggtttcgccacactgcccatggtcttgaacccctgggctcaagtgatctgcccgcctcagcctcccaaagtrctggaattacaggcatgagccaccttgcctagacttagttaagattttagtaagagtacatcaacatcaatccagtaagctttgagtttttaagagattcacaatatctttcctcttgattayatcaaaattaaagagccatgttatatttacctaacactaaatatagtttctctttttaatttattatttatttatttttttaaaggccagtcaagtgaagcagtgggagtggagaaggaacaaagaaatctgtaactgattgtaatgaattagttatcaacaccactgcactcggwcctgcctaaatacacttgcaattactaaaatttattcactgaaaaccaaaatttcacaacacagttattctgtttcaatctcaactgagtgtactgcaatccgattctctcatcagccacccaaagttagcacagaccccacaagtaaaagggtacgctcccaaataggcgtgcccttatttcagacaccagccacactttggaagtcccaggctacctgcacttctaacagactggctataaatttgagagtttccacaagtccctcaggtacactaaattcactagagcttgcaggactcaggaaagtgatgtatttacaattacagttttcttacaaaggacacaaatcaggatgaccaatcaaatgaagagatatatagggtaagatcaaggagagaatgcagagtttccatgccttcttcttgtggaaaaagggcatgtcacctactttcccctgcgcatacatcagtgttttcaccaaccaggaagttccactaaatctcagtgtccagagtttttactggctttactacatatgcacaactgattaaatcattggctacaagactaagctgaatctccaactcctttccctctccagaggccaggttggttcagagtcccaaccacatagttggtccttccagagacagcgcctatcctgaagctatccagaggcccatcattagttacctgattagcataacattcccgtcgtcactcaggaaattccaagggtttgagaagttcaggaaacacagacaaagaccagacaaattccttttttttttttagagacaggctgcagagcagtagtgcgatcatagctcagcagcctcaaactcccgcctcagccttccttgtagctaggactacaggtgcacgccaccatgcccagatgagtttttatttctatttttcatggaaacaaaaaaataaaaatgtttcttggcctcaaactcttggcctcaagtgatcctgcctgggcctcccaaagcactggcattaaaatcatttgccactgcacctggccaaattattatacgacagttttaggtgctgtgcagcttaccaccaatcaaagaacacaacagcagattatttacttgcaaaaataaccttagcaatgaattcaagatctagagttctctgataataaggaataaacaaagtttttgatcctagcccatgtttgtcatactaataataaaatttgaagtgagaaaaaaaaattttttaagtaatttaagtattgtaactgctattatgaaactctaagaggaaagagtccataatttttagattaataaatgtcatgcgcttgccagtgcttagtaaataatttttattattctgaagaacatctaagtgattttcaaataataaatacagccacgaaaacaaggttctggttctggctgaatatgctggtctagtagcctagtgcaaatcacaatgtctttgagcaagagttttctcttatagaaaacacattattttattactaaattagaaacacattattaattattcttaagtatttaccttctatggaaattatttatccaatgtatttctgggaaagcatattgttatccatgtcacattttattattcaatataaaacaaatctttccccattactaaagaacatattctttgctaaagagacaccaagagagccacgctttgccttccagaacaaaagaaagtaactcaacattaaaaaacttagggctgacaagtaacactatggagcaacactgctaagctgattcaaacaaactttcctgctgcatgactcaaagaagcagtcatttggtcagaggtaaagtagacctttccctccatttccattaactacttttgctgccaatacatactatcaccaaaaaaatttttataagaagtcaaaaacacaaggaactcagttaagcttacacaaaaataccactttcttcctcctacattagaaatcaacaaasttctctaaaagaaagatataaattacaaggtagagaagggggtacatttgttctactaatgtaaaatatcacattagtcaatgcagtctattagtaaatagactatcctgtttcatggtctatgaaattatcctaacatgagcaaactgggctaaatatgttagaaacgagactcactgggaaagagaatcttcctgtaagaatcaaacagaagtctcattattctaacaattaaatgaagttgttggaagcttaaaatggttcagttgatgtgatttgtgctaaacaaaagcagttatctgagtctctctgcgttagtgtgtggcctttcatctaaaggccttcaaggccctcccctactatgtttggtgttagaagacccagattttaaaatagtattaaggttctgcacagactgaaaatcacacatcacatatatcaggaggagaacaatgacctataagatgactaagaccctcccagttctatcagagactgtgattctcaaagctactacctaacgtacttttttgaaatagaaaaaagtcaagtcacctttgggggaggggcgaggtggagccattttaaccactttttgaagtctgcaaaattaacataaaacaaagcaaccaaaaccaaaaaaagtgaggtgaagggagcagaattttccccttctccatgggaaaaacaaagtcttccttcctccctccatcagaaaaacataaaaagaaaatcctcaagatgatccccagccctgagtttcaattcatgacttttactatccaccaagaatctccacttgctgtctcagactcagcagcctcaacatcaacgtttacacaaccaagctcatttttcccctcaaagcttttcctctgtcgacagtgccacaattcatgtagccatctaagtattattatccacttattcatccctaaagaggagttaatttggccaagtgtggcagctcacgcctataatcccaacactttgggaggctgaggcattctaaggggagagacccatagttttgtatgcctacaggcctagctacttgggaggctacagcaggaggactgcttgagcccaggagttaagaggttacaatgagctatgattgtgccactgaattgcagagccaagactctttctcaaaataaatacataaaaataatttttaaaaaagtttggttgttttaagtggctaaattttgagatagtttattatgcaacaataaataactggaaaaaatagtgaacaaaatatccaaaataatccttgctctcacagtttacattctaagaggagggagataataagtataataaattatatagtatgttggaagatgaaaggtgcaatggaaagttaaaaaagaataaagtgaggaaagccagcagtacacaagttgcagtattaagtaggatgatcaagttggccctcattgaggtgatgtttgagcaaacttgaaggagacagagaattaatcttacctccttgggaaaatcaacgtgaactaagataccagtgtcacaaattcagtccctgccaactaagtccagattccttagatggcatttgaggaccaccatgatctagctggacctactttagtttctgaggctcctgcacttgagccacgccaaatgacgtgcagttcccttttaagtacgatatcttatgggtccttgctagacttcgtgtgtctgaaacaacttttcccctgtaataattttctattgccccaagttattatgataaatttagcagcttaacacacccacatttattatttcacattttccatgagccagaagtctggcacagcatggctcagctgattcctttactccaagtctgacaatactgaaaccatcctgttgacagggctgcattcctttctggaggctctgaagaagaatccactttctttattcttattctttgagatggagtctccctctgtcacccaggctggagtgcaatggcacaatcttagttcactgcaacctttgcctccggggttcaagcaattctcctgcctcagcctcccgggtagctaggaccacaggcgcccgccaccacacctggctaaagaatccattttcaagcacactgcggttattgctggaattcagttccttatggttgtagagctaaggtccccgtttccttgcaagctgtcagccagctgcccttagcacctaagatctctctttggtccttgtatatggcacccaacatctcaaatcaaaccatcttgcacttgaaatctctctaatttcttctctcttctgcagcagctgagattttctgcttttaaggactcgtgattatacaggacacacctggataattcaagcaactctccctattttagggtcagctaattagtcaccttaattaaatctgtaaaattccttaacagcagaacctagactgctctttaactgaatacccagaagacaatgtttgggaatattttaaaaattctgcctaccacacccctccttccatgtctgcctattaggctcctacacatctttaagaattctactcagggctgggtgtggtggctcatgcctgtaatcctaacattttgggaggtcaaggcgggggaaataacttgagcccaggagtttgagaccagcctggccaacacagtgagaccccatctctgcaaaaaaattttttttaaaaaattagccaggcatggtggcatgmgcctgtagtcccagctactcaggaggctgaggcaggaggatctcttgagccctggagttccagactgcaatgagctgtgactgcaccactgtactccagcctgggtgtcagagggagaccctgtctcaaaaaaaaacaaagattctattcagaagagacctcctggggaaacctttcttgacctgtccagaagagaggagtttcttccataacrctacaaaatctacaaattagaacagatttttatggtccaatattttaaaaattccatagcttaatttttaaatgaaccactatcgtacaaacactgtactaaacaaatattaattgatgtgttaaaataaaattttttctcaacagtaaggttcaagataaagcatttatcttcctttcttggttatcttaataatacgtgaatatgatgtcttttttttttttttaacagagatagcactgtgaagttcttggaactttgttctcataattgctatggcatattgttgtctgcttaccatattacattaacactgttaaattatatcttcccctttataaattaagctcttcaacacattattcacccttacatcctcaacacctacttaatattgtgcctggcaataaaaatgttcgttgagtaaatggatagatgaataaaaactgtactcttaggtctgaattatatactcyaaaatttttaagwcacttatttaaaatattggtagctttgaaaatgattcatttcaaagccttgactatatataaactaaaatataatttaagaaataaaaacatcccctccactgcccttttttttttttttttttttttktgacggagtctcgctctattgcctaggttggagtgcagtgctcagctcactgcaacctctgcctcctgggttcaagcgattctcctacctcagcctcctgagtagctgggattacaggcacgtgccaccatgcctggctaatttttgtatttttagtagagacggggtttcaccatgttaatcaggctggtctcgaactcctgatcttgtgatctgcccgcctcggcctcctaaagtgttgggattacaggcgtgagtcaccgcaccagcctccactgcacttttctttgacatagagtcttgctctgtgacccgggttggcatgtggtggtacaactacggttcactgtagcttggacctcatgggcttgtcaagcgaccctcccacctcagcctccagagtagctgggactacacgtacacaccaccacacccctggctaatttttttttttttttttaatttttagtagagataaggtcttgctatgttgctcaggctggtctcaaactcctgggctcaagggatcctcccaccatggcctctcaaagtgctgggattagaggcatgagccactgcactcagcctattttctttagaatattttattcctttaataatttgtgttggtttgtaaattaaaatttgatacctaccttatttcaaacatagggatattattattgtactgtatatccgtcatggtgtcacataatcaaaattttattaacctttgctttgaatcctagatttcatggttatcttctttcttcagctttgcattggtcaaactcatttcattgttttaagaaactttttaaaaagtaaatttaatttttagaatggttttagatttacagaaaaatagggaaaatagtaaagtttccacataccctaaaaccagtttctcctaatagtaacatcttacattagtacatttattaaaattaacgaccagtatttggtacattattagcgaaagtctaaactttatctagattttctgagtttttacctaagatcctttttgtgttcaagaatctcacccaaaataccacattagagcagtcaagcctccctaagttcctcttggctgtgacggtttctcacattttccttgttttagatgaccttaatagttttgagtagtattggtcaggtattttgtagaaggtccctcaactgggatttgtctgatgtttttctcatgattatactgagtttataggtttggggaagaccacacaggtaaagtgccattttcatcacttaatatcaatgattcatactgtcaatatgacatcacagttgatgttaaccttgatcacttggctaagatagtgttcttcaggcttctccacagaaaagttcttttttctctccttttctatattgcaatcttcagatggaaatcactctacccaacccacattttagaaatagagagttatacttcacctcttgagggtaaagtacgtatctacctctatcatttggaattcttctgtaagggagatttgtctcttctccatttactaatttatctgatcatttatttacatcagtatggactcatgcatatttattttatattttaagtcatgacagacttttatttttctgctcagtgtgttccagtttgggccatttacaactcttttatttggctcctatgcccatttgatgcacccccatctatgtgttgtgtggcttctttgttctgttttgggtttttgagcacttccttaattgccagcagtataaggctcatatttcttgccccatttctagaaatcagacatttctccaaggaccccctgctcctttaattggaaaatggtattagaaatgaagacctctggggtgtcattgcttgtaagtccctcagataacattttttttttttttttaagagacagggtctcactctgtcacccaggctggaatgcagtagcacaatcattgttcatggtaaccttgaactcctgggctcaatcaatcctcctgcctcagtctcccaagtagctaggattataggaatgtgccaccacacctggctaatcttctttaaaattttttgtagagagagacagggtgtcactatgttgcccaagctggtctcaaactcctgagctcaagcaatcctcccacctcagcctcacaaagtgctgtgattacaggtatgagccactacacaaagccaggataacttatttttgcttcttacctaaatattcagaaataggggaargttggtaataccaktttataaataaaatgtttaaatcttttataacaataagagcaacaggctgtatcatatagtcaaggtttgtagtaggctatgctacctagttttatataagcacactctatgatgtttgcacaataacaaaacctcttaatagtgattttctcagaatgtatcctcatcgttaggcatatgagaataaacgaataattatgaacatgggctagttgaaagaacacaggaatactactgactttgtgtaaagatttttaccttgtttgtacaaattctacaataatggttttgtaggactatgaaggttatttaataaaaatttaaggctgggcatagtggctcacgcctgtaatcacaacactgtgggaggccaaggtgggtggatcacttgacattaggagtttgagaccagcctggccaacatggtaaaaacccatctctactaaaaatacaaaaaatttgccargtgtggtggcgcgtgcctgtaatcccagctactygggaggctagggcaggagaatcacttgaatctgattcagggaggcagaggttgcagtgagctgagactgcaccactgcactccatctgggtgacaaagtgagactccgtctcaaaaaaaaaaaaaaawtaagatttgtgacactgggtgcagtggctcacgcctgtaatcccaacactttgggaggctgaagcaggagaatcactttggaccagcctgggcaacatatcaagacctttttctctacaaaaaaaaaaatttttttttaattaggcatggtggtgcacacctgcagtcctagctactcaagggactgaagtgaaaggattayttgagcacagaagttcaaggctgcagtcagctctgatagtgccactgtactgcagcctgggcaacagagtgagaccctgtctctaaaaagaaaacagaacgtaagacttgcgattataagccgagtgtggtggtgcatgtctgcagtccgagctatttgggatgctgaggtggaaggatcacatgagcccataagttcaaggctgcagggagctatgattgtgccactgcacttcagcttgggtgacagagtgagaccccatctctaaatayatacacatacattttttaaaattgcgattataattatactgaaattatgtttaaattatcattattattattattgtaacagtattggattctttcacagtatgatatagaaatagatgagaaataaccagggaaactacattattaattttgtacttctgtaagaccattccacatacttatagttttgcagatatacttacatggtgggtaaattttattgccataaatgtttattaagttgtacttctgtgagagactacagtatgtcaattcctttcaggatgagttctaaacaacttcccattttgtatgaaggaatgaacaaaaaaaggaatgaacttgaactctgttcaattatatacaattaatcagtagaaaaactgttacatagatatgctttttacactaagattaaactcatctattcactagtaacacaatattactggtataaatagactactcaaaattctgtactgccaaccaacaaatatattgagccttgctacaagcttagccaagcatattaggaatatagaaaatttatcagtaatggttcttccctcagcatttatagaagaaattcttgaaaaggcaaaaattcaactgttagagacaattatagcacaatggagaggctttagagcatrtcttaaaataatttaaatatatgcattaaaagctactctttccgaaaaaagtgattacacttatcttgcacgtagatgtatgggtatgaaaactaggttgccccttgtttattgggctgaacttgctccttttgataattactaaagtatgtcatttatttatattcattttctctaatgatgtacagcatattctctgtgttagtatatctcgcacctaaacaaattaagcatgggtgggcacggtggctcgcgtctgttagctctttgggaggctaaggtgggcagatcacttgagcccacragtttgagaccagcctgggcaacatggcaaaaccttgtctccacaaaaaatataaaaattagacagstgtggtggtgcacacctatagtcccagacagctacttgggaggttgaactggatcacctgagtctagggatggtgaggttgcagtgagctgtgatcacgccactcctctctagcctggacaataagagtgagaccctgtctcaaaaaaaaaaaaaaaaaaaagttaaccccaagccatgaagaaaccttggcccattatctattttttccatttcttcatcacatttgagctttcatcattgatgatagcagtcatttttctgttctttggttgcaaaacaatatacgatttatgkgctccttcaagactgatataatatctgactgccattaacacctaccttttcaagagctgaccatctgatctatatattatttaagttctttcctttgtttcttgggctgctcaactttaatgcaatttattttcctgtctgtaattttaaaaaatttcaggctgggccctgtggctcacaccttctaatcccagcactttgggagactgaagtgggagggctgcttgagtccaggatgttgaggctgcagtgagccctgatcrtgccactgcactccagcctgggcaacagagtgagaccctatctcaaaaaaattaaaaagaagaaattagagcatatagagaagtaaaacagaaataattaacactgtgtgtagataccttccctcctgaattcmacaaatgttaacactttgctatattcattkcacaactttttaaaacaraaatatgaatcttaaattcggctggggaaaaaaaaacagaaataaaaactttagataaatgaaaattccctcagctggagctcagaacatcagcctccattctgcacatccatatctttcaggactgtttcctacatgtataaactaccccactacaacccacggtgattccttttttctctaagccctacccacttgattatctaatataggcaaatgtttgttttgttttgtttttctgtgagaatgtcctctatcctgcgcttaaagcggactatgagtagttagcaccctgtatcacacccagctctatgccctaattctgtattggctgtttgctgcctttgtcttgagacttaaggtgaaarccatcttagctgaggtgaagggcagtgaaaagtatagcacagtactgaatgagaagtgcatagaaatatgaactgataaaagaaacaatctctccataactacacaagcttcagttaaattaacagctgtagccttagttttactaacgattgtatttggacgttagtctgtaaaagaattcacctcccataggaacaatgttataagatgattaagtctcctcatttcccagccctaaactagtaggggtgcttttaatgatccaagactgggatctgggaaggtcagggaggagaaagtgacagagatcaagttcagaagtccttgaatccagagttgatgaagggctgggaagtgaagcacaggggttctgggagtctaagaagtcaaatgacactttggggatcatcaaacactatgaagtttatcctttactgtgcctttctgcctcacactaacccttcctataacttgttacctgcagctatgtactcttgcctttgcaggtggatgagaaagtgggggctccttccctcaactcagccttgcattgctggaataaaaagcctgagttcccaaaggtagatctgcgggcagtctctgcaatgggagcagtgcaaagtggagaggcagggaaagagctttataaactgaagctctggaagtcagaaacctctcacattcagcttctctgattacacagctcatctttcctcctcaaccagactggatgtcccactatcagagactatgaacacataaaacttgattcaaatattttaggaaataacactacacaaacaaataattcaaaaaatgttagacttgaattatctttaagagcctgagcagtccctctcyctctctcattgtttacattaggagaacacagatgctcagctaacatggtttgcctaaggtgagaattaaagacagagctgaggcttgaattaagagtctccagaaacccagtctcaaagacagtgtcttcctctattaaatgtccacctctgtacccttgtgccaggaccagggctaagcatgtaagcatgaggcacatactcaataaaaatgggccaacagacttttctacatgtaatctgtgagctttgaggcactattcaaatatacctttttttttttttactaagatagttagcaagcaaatatcttcaagcagcttttaatcaagcttttagtactgtatattaccttcccttctcaaactaacttaaaatcaccttaattccacactcactgcatcatactcaaaagcatagctaattttctgggttttttaaatcttttttttttgcctcatgctgtgctaatttaacctcatcttggtaaacaagaaaatggtcctagtttgacagactctagctgcagcaactgcagctggcctatatgcaaaccaattttgttcattctttatcctggcagggagccctgccctagaattgttttagggctaatcagcattaaacctgcgtcagaaatgttgctgaaagcagccctagagcaagaccacagcaacaaagctcttcaggaaagggatgacaaatgcagcagctatgtaaaaatctatgggaagacttttgttcatgagagtaaaagtggggcctagcttcttttctgtgctttggcacttatcctgtggaaatgacttcgaaaggagatacggaagacaaacgatgcaccaaatttgctctatttctttctttctgggtgcttggtgattagccaaaaaatgttactaacttcagatggtagcaaatggtaaagaaattagatttgcatcctttgctactctctgaacttgaaaacactgcatgacttgtctttttgaaaacactgcatgacttgtgagttagcatgattttctataggatgaacctgaggtacaagaaacagatgtgcataatgacaccttgagtagatataaacaactctgtctaaaaactttgttaatggataaattccttaacaacaaatgattaaatattggagtggttttctttctactcatctgctggattcagtctgtacctttcagtgtatcacattcattttacattagaatttgaatgtattagcaatctaatacattgttagtaactttcacaagtactcacaaaagaaggccattaggcttccctaaatgccaccagatctgtggggctcacacagaagtcaaaaaaggacagtccatttttgtctgatcactgtagttcttgaacatatggttgctttctgtgtctgctcacttaattctcattaaatgactagtaaatcagtaactgcaacagataagcatgcttcagaatttttttataacagctttattgagctatattgcacatacccttacactcacccttttaaagtatacaattcagtgattttagtatatttatagagttgtgtgagcatcactactatctaattttagaacattttcatcaccccaaaaagaaaccctgcacctcaccttagcagagagactttttgatatggtagccatccctgtttgctaggtgtgtttgctacctgttcaggcatttcttggcctgtgtcaactggaacatggcaaaaaaattttatagtgtttaggcaataaatgaaaaccctcataaaatgtgtttcaaataagctttttctctagtccaatcctatccatgtaccagcttggagactttcattctaagaaataatttatttgcagaagagttaataaacactatccaacttacagatatcaaaatgaattgtgataacatctacaaaaatcagtttcctgcagatattctgcgttgaagttcttactaatcaactatagggtgctatagaactttttaaccttgtttccaaaatatgggaagacaattttgcattattgcagtttccaggcacttataatgaattaaaatgaaacagctgttaatcatatgcagcaaatctctagctagtatagaagttaggcacacctagcatagaaactaggcagataatggaactgaaataaacttagtaagcaaagaaagttaatagaaagataatgtgaaccatatatataatttaaatttttctagtagctacttttttttctttttgagaaagagtctcactctgtcatccaggctggagtacagtggtgtgatctcagctcactgcaacctccacctcctgggttcaagcgattctcctgcctcagcctcccgactagctgggactacaggtgtgtgccaccatgccyggctaatttttggtatttttaatagagacagggtttcactgtgttagccaggatggtctcgatctcctgacctcatgatccacacacctcggcctcccaaagtgctgggattacagggggttaacccccgtgcccggccttaaagatatttttaagtttaaatatttttaaggttaactccttttttatagattcccaagagcccttctgatgaaaatccacttaattttgcttaattttttcctgtccaggcctggagaatccaggtttttgcttgtagactatatttcttgcccctcccttctcttcctcttttctagtacaacatactctgtcatttatttaaacaggaaattatcctatagtttgagaaaacatcaatgtagaagtgataatgtaaattaagtaaatttctgatcatcttaattcctcagtacagcttgnnnnnnnnnnnnnnnnnnnnaaaatgaaacagctgttaatcatatgcagcaaatctctagctagtatagaagttaggcacacctagcatagaaactaggcagataatggaactgaaataaacttagtaagcaaagaaagttaatagaaagataatgtgaaccatatatataatttaaatttttctagtagctacttttttttctttttgagaaagagtctcactctgtcatccaggctggagtacagtggtgtgatctcagctcactgcaacctccacctcctgggttcaagcgattctcctgcctcagcctcccgactagctgggactacaggtgtgtgccaccatgcccggctaatttttggtatttttaatagagacagggtttcactgtgttagccaggatggtctcgatctcctgacctcatgatccacacacctcggcctcccaaagtgctgggattacaggggtagctacattttaaaaatagttaacaacaacaacaacaacaacaacaaaaacaggaaaaattcatcatgacaataaattttacttcttgtatccaaaatattgctccaacatgtaataaayatacaaaaatgttagtgagatattaaatctttgaaatccagtgagtattttacatctacagctcatttcattttgaactagtcaagtttcaaatactcaagtcacatgtggctaagtggctcccatatcaagcagcacagccttagatcattaaagttggtcttttttttttttttaatttcatcataagggattgcctggctataaggatgccaagggaaataatgctaactgaataaaataggcgtcaaaaacaatagaaaaggttatatcaatgttatatatagtaagttcagagataaggcattagaattccactgtacattctgtggggtgtgcagatatcagacattcactttagtacaaaaaaacttttttttttttttaatatttagagacagcgtctcactatgctgctctggctgcactcgaactcccgggttcaagtgatccacctgcctcagcctccagagcagcttgggaatacaggcacacaccactgcacctggctattctaccaatacttatttttgtagactgaactgtacagggttaagtaaaattataatgagaaaattgctgattgtatttcaattaaatttaagaaacagtttcatttttgttagtctgtcctatacaagatgcctacataaaacagaaatgtgtgtgggtttttttagtggcttttctactcctgtatatctagcgtcaacaaagaccaccaccatccatccaaaccattaaaccaaggaatgattcttgcttcctcttgcttcccctagccatttaagtaactgcctgtaatgctaagttccgttccatccccatgccttagtttaggtacacttcatctcttgtccagacyacttcagtagcctcctacctggcctccctatcaaccagactccatactattgccaaaatcatcttcttaatatgctaatctgatcattataatyccctgcataaaatctttcagtggctctttatgactggataaaaattccttagcttgtaatacaaatttatatttggcccttggctaccctcttcaattctatttactacccttcctcttctctctcatgttagctatagtaaatttgctgtcatatcctcacccctttctgcttttacaaatgttttccctcagtttaagacatcccccactcaatccttgcccacttagcaaacatctgctcatrgtgcagagttacattctcagtgaaaatttccccatctcccactagggagagttagataaacacctctaaacgctgatttacagcatctatcacattgtgcagtaraaaaggctaagctgagagtcaataacctttggaaacttcttagraaagcatggccatatcaggaactaaaatttgctgtactctgcagtcctaaattcatgtacctccctttgaaagctgggctgatcccaatttcctaggtgaggtaaatatcaaagaggttctaactagttcaaaattttaaaactattaaaattgctattattattttgagacaaggtctggctctattaccctggctgaagagcagtggcacgatctagctcactgcaacctctgcctcctgggctcaagccatcctccccagttcaggctcccaagtagttgggactacaggcacacaccaycatgcccggctaattttgtattttttgtcgagatgaggtttcaccacgttacccyggctggtctcgttacttgtgagctcaagcgacacacctgccctggcctcaccctgggactacaggtgagcgactgcacacggccttttttaacctttaactctccaataacttactgcatttgttcagttcttacctgatcccagtaaagtatccatgacaaaaacatctaaatacctttccttttttaggcaggagggagtggggcttatatgcaggctttgacttccagttttattgagggtggcttcatcccttagaacaacttttgtgttgttttcagacctagagtggggctgtgaaactcccaagtcttgggttataggggaccaatatgggagattccctgaggatgttagcattcccagaataggagggaaggtgagataaatgtgcctttttttttcctttttttttttttttaaagaaaaagcctcattctgtcgcccaggctggagtgcagtggcgtgatctcggctcactgcagcctccgcctcccaggttcaagcgatcatcccacccgaacctcccaagaaactgagattaccggmatgcaccaccacacctgcctggctaatttttgtatttttagtagagatgggggtttgccatgttggccaggctggtctcaaactcctggcctcaagtgatccgcctgccttggccttccaaagtgttgggattacaggtgtgagccaccacacctggcctattcttgcaattctggaagatttagggggctggcaggagacaagactgagattgtttaggccatcctgttgctgacacaatcctggcacttaagcgggaatgcagtggcctaagtgtaaggcaacatatctctcataccatttcaccaaaacaaaacaaaaaacacttctgagtgaatgtctggccatcttattagcatcttattaatctgttttgacattatcctaaaaatatgcttttcctcaaaaaaaaaaaagtcgtacaacactgtgaatgtattaaatgccattaaattgtacacttcagaatggttaactttatgttatataaattttgccccaatttttaaaaatgaaaaaaagagtatatgacaagaaagataactacaggattaccaaagccattatattttccctcatttgtatgtacatgacacactggttctataatgtttcccaagaatagatcytgaatcctaagactgctgtgatgggactctgagagaagagattataatgtcagaatacttagctcctaggatgtgattaagcttattttgttcatcactaaagtggtatcatagcatyctttctaccatattaaagtaaatgaatcctaattaacatctgtaatagctcagtgggcctctttgtcttttaagtgaaaactactgagcccttttttttttttttttttttttagatcatgtcatagaaacattggtggcacaatccaagtggtgacgaatcaattaatgcatggaataaaaaaagagctgaaaagacagtagtaaacatagggctaatttatgaattgtatttttaatgaaattaccttttattaggaaactctaagaggtctatttctctccttttgaatttgggcttgccttgtgaccagcagaatatggcagaaatgtcactgtgacagtcctaggttcagcccttaagagagtcctggmagctcctgttgtttctatcttagaattcatttaagaagcctggttgggacgggcacggtggctcacacctgtaatcccagcactttgggaggctgaggtgggcaaatcacctgaggtcaggagttccagaccagcctggccaacatggtgaaaccccatctctaccaaaaatacaaaaattagccgggcatgatggcatgtgcctgtaatcccagctacttgggaggctgagggaggagaatcgcttgaacctggaaggcaggggttgcagtgacctgagactgcaccattgcactccagcctcggcgacagagccatgatactctgtgacatttacaaaagaaggaatatccttgaaatttaagaaaaaataaaaaccaaaaacaaagaaaaagaaaaaaaaagaaatttgagcaaggtaagcttaggataagcagaggacagtgtgacttgacacatcagcttagagacccagttttctatagtcctctcttaactcctatcatctgagagccctactctcttttactgattctctcaccatttctcaggcctttgtccctgttctcttgctcccttccattcccctttcttcatctactaaaatgatacacctcatgagaacatacacaaatgaccaataggcacatgaaaagatgcaacatcattagtcattagggaaatacaaatcgaaaccacaatgagataccacttcacacccacttgcatgaccaaaatagaaaagacagacattaacacatgttggcttagatgtaaagaaattggaaccctcatccattgctggtggaaatgtaaaataataactgctttgaaaaagtctgctaattcttcaagtggttaaacatagtatatacccaacattaataaaaacatgtctgtccatgcaaaaatctgaatgttcatagcagcattattcataatagcccaaaagtagaaacaacctaaatttccatcaactgatgaatgaaaaactaaaatatacttctataaaatagaatatctggccataaataggaatgtagtactgatgagtgctacaatgtggatgaatcttgaaaatatgcaaagtgaaagatgtcagacacatactgtacaattctatttatatgaaataccagaataggcaaatttacagacatataaagaatatgtgttgccaggagctgagtgaaggggagaatggggagtgaacacaggtatggggtttcttttgtggctgatgaagatgttctaacatttattgtggaatggttgcacaactctgtgaatatatgcatagcaattgaattgtttgctttaaatggtgcatttgatatgtatacgttaataatatctcaataaagccatttaaaaaaattctatgaggtcaggcacggtggctcacactataatcccagcactttgggaggctgagatgggtggattggcttgagctgaggagctcatgaccagcctgggcagcatggagaaaccccttctctacagaaaaatataaaaattggccaggtgtggtagcaagtgcctgtggtcccagctactccagaggctgaggtgggagaattgcttaagcccaggaggcagaggctgcagtgagctgagattgcaccattgcactccaatctgagcagtggaagtgaaaccctgtctcgaataaattttttaaaaaattctattaatactttaagggcaagtttaaatgtgatcttctccctatttctcacctcacccagttaacattaataatttcctctgtgctrtcaaaccagttgttattacagtctgttagttatatattacctatattagaacccaggctagtaaaaaacttactcaaatttctttacatcccccttcacaaggaggaattcgatacagttcattacacagggtaggtacctaacacgtctttactacagaaatatttacatttacccattaaaatgtcacaaacagttaatggttaggctaggattcacctcttcaaatgacaacatgaaaggattgggaagctctgatggcagaagagaagacrctagataaactctgcatttgacccagaaaacatgtcaaatcctatgatcttgtctaaagttcaacaatgccctgtagctatatattctagtgctcctaarttttacaacctttccttcctttagaaatattcacgatgtgaatgctgaggcataaataaataaaagaaatattcacttgagcaaataatccacaagaatcctttaagaagtagtctctgcagagattaggggagactaaagagacataactaaatgcaatgtggtatcctggattggacagtggaacasaaaaagggtattagtggaaaaattcacgaaatccaaatgaagcctggagtttagttaayagtattattccaatgttaatttcttagttttgatgaatgtaccatggttatgtgaaacgttaacatttggagaaactgggtgaagggtaaacaggaattctacactgtctttggaactcttccgcaaatccaaagttatttcaaaatactgttgtgactctactgtgaattaaggcaaagaaggatatattaatctaaagtattttcatattcatccattcaacaaactattttgtgcctgctatgaacataacattctgggatgactctgggaacaaaacaaagattcctgccaccatggtgcttatagttcagtagggaaaacaggcaataaacaataaacataataaataagttacacggtatgagagagggtgatatggaaaaacatgacagtaaagagcattgagggatcagcactgggaagcaggtggagaatcacaattttaaaaatagtcatctggaaaggactcactgacacagggcatttaggcagacatgaaggaggtgagacagtgagccaaaagatccttggggggaagagctttccaggcaaccagaacagctaaagcaaagatcataagacaggarcatgctcagattgtctggaaaagagcaagacaaaagcaatataatgagtgaagaggagagaaagctccagaggttacgggcggccagatcatatgagggatctggcttttcctctgaacaaatgggaagtcactggagactttcaaacagaggaatgctgcgctttgaaagaatcactccaggctgggcrtggtggctcatgcctataatcccagcactttgggaggccgaggcgggcggatcatgaggtcaggagttcgagaccagcctggccaacatggtgaaaccctgtctctactaaaaatacaaaaattagctaggcatggtggcccrcacctgtaaycccagctactcgggaggctgaggcaggagaactgcttgaacccgggaggtggaggttgcagtgagctgagatcatgccactacactctagcctgcgtgacagagcaagactccatttggggaaaaaaaaaaatcactctgacagttgtattaataataggctttatgcaacatcacctatatggtattcttggaaaaaatgtttaatgtgaatctaattatgaggaaacaatcaggtaattccacaacgtgggatagtctgcaagacaatatgcctagactctttaaattaaaaacagtcagtgtcatgaaaaacaaaaaaggtgagggagattattttagattaacaaggccataacaaccgaacataatgaacaaccttgactgaaatcctaaacaggagaatgtattaatttccaatggctgctgtaacaaatgacctcaaacgatatggcttgaaacttattctttcacagttctggaggccagaagtcagaaatcagtattactggtctgaaatcaaggtgtcagcaaggccgaactccctccagacggtctaggggaaaattcatttcttgtttcttccaagttctggttgctatgcgcattctttggcttacagctgcatcactccaaactctgcctgtcttcacatcacttcctccwgcgtgtgtcaaacttccctttgcctctctctagaagggtgcatgtgatagcatttagagccaaccaggataatctccgcatctcaagatcctgaatcacatctgtaaagatattttttttccaaataatgtaacattcaggttccaggtattacgacctgacatttaatctacctaagaggtaaaagtatctctgaccaaggtgtagcagcggagatagtgagatgtatttgaattctggatatattttgaagggtgaggcaataatacgaacagaccaaacacggagtatgatacaaagagagtaataaagaaagcgtgcaaggcttttgagagactgcactgtcaactgacaaagggaagattacatttctgaggaaacaataggaatccagttttgaacatactgattttgagatgccaattctaactggagatgttaagacagcagtcagataaatttaagtctggatttcaggagggaggtctgagctagagaggtagatttaggactcatttgtaaagagctgatattggatcatattaaagtcatgagggtcaggcacggtggctcatgcctgtaatcccagcactttgggaggccgaggcaggcgaccacctgaggtcaggagtccaagagcagcctggccaacatggtgaaaccccgtctctactaaaaaacacaaaaattagctgggtctggtggcgggtgcctgtaatcccagctactcaggaagctaaggtagggtgaattgcttgaactcgggaggcggaggttgcagtgagccaagatagcgccactaaactccagcctgcgcaacagagcgaaactctgtctcaaaaaaaaaaaaaaaaagaaaagaaaaaaggcatgaggtattggatgagataaccaagggagaagatgatgacagcaatctatgaaatcacaagatgcctgacagggcagaaaaaaactagagaaaatcttataacctcagtcatcctaagattggatggacccagcagttctctaagaaaactgcatccaaaggagtccacagcactcaaagatcttggaagattttctggttcccctcaatttaaaaatgtatgcagctaatcaaatggcaggtccaggatccctgagataggaaacttagaaccaatattccacttaaacattccacaaaagcattccaagtcctaccaaaataattcaacagccatcactcaagaaaacatcctttaggctgggcacggtggctcacacctcactttgggagaccaaggtggggggatcgcttgagccctggagttcgaaaccagcccgggcaacatggtgaaaccccatctctaccaaaaatacaaaaattggccagtctcataacccagtctcaaaataaataaataaataaaaatttaaaaataattttttttaaaaaaraaaacatcctttaaaaaatgcccaacacaaaatcacatcagtttttattaagaatctcttacatttttaaaacacagagtgataaaaactgctataattgccatatgaatagccatggcttaaaatgctgcattctcccaaaaatgcacttagcacaactgcacttttttattttattactgcttccagaagaaggatctagaaactttgtgttatacaaattaaacaccatagcactataaatcaattttaatgaaactgaatacaactggacatgttaactaaatgaaaatatactagtcacatatctaaagaggagcaacatttaaaaaaaatacatgcagccgggcgcggtggctcatgcctgtaatcccagcactttgggaggcagcggcgggcagatcacttgaggtcaggagttcgagaccagcctggccaacatggtgaaaccctgtctctactaaaaatacaaaaattagctgggcgtggtggcccatgactgtagtcccagctacttgggaggctgacgcaggagaatggcttgaacccaggaggtggaggttgcagtgagccaagatcgtgccattgcactccagcctgggtgacagagcaagactccatctcgaaaaaaataaaaataaaaacaatatatkaatcagtttcaggattatttgtgaaaagtgaaacactgtatacaatattttgaatatgcaaacatttttctagaaagaaggttcaaaacattttactatattctcaatggtatccattattccaacatagtttaaaactctcaggtttgaattaacattgctaaagacctgaaaatcaaaataaatcayagttgaatatgtcagcactgaaaaaatattaaattttaaaaatagaatacacattttcacgctctttaaaaataattatactaaacaaagaagggaaatttggcaagttaaagccatgttcagacataatgaaaattatttaatgaaaagagtctccaaagaatttccttaacaaaataagtacatttacttctgaaagctttaagccttagaggaacccaagcctgggatctcaagtttaagttgctgctatcaaagttgccagtgaggtaatcagctaaaatctttctatttctagtaatcagccaagattcatctcctattttactctagggatctcaaaagggcttttaaattataataagaataggtaaaattgagaaaggtccgaaacacaaaagggaagcagaaacaggctaagtaattattttcaacacagttcattatgcagtgttcaaagaaatgcatgctttcctgaattaaaatgttcttaatacatttaatattaggcataatgttgactcaaagtctctttggctctacacacattacctaacacttttatatcctactacgagttaataactgttcttagaactaactttttttttttttcctttttactttgagacggagtctcgctctgtcacccaggctggagtgcaatggygcagtctcggctcactgcaatctccgcctcctgggttcaagccattctcctgcctcagcctcccaagtagctgggattacaggcgcatgccactacgtcccgctaagtttcgtactttcagtagagacagtgtttygccatgttggccaggctggtctcgaactcctgacctcaagggatctgcctcagcctcccaaagtgctgggattacaggcgtgagccaccgtgcccagccagctctaacttgtattaactcatttaattcacatatactatggtaaaatgatttttttttctgagatgaactccttggactgacagtaagcactataggtttactttagggtttgagtcagaagttacttccataagaaaagtcttttaagtcctgattcctggcatcatgctattgtggctatagtcaacccagaattacattccttccagaatgaattgaagaatctcattaagttcaaaattcacttaaatactgacggaccctgcaacttccttgatccgcccagcagaaactgagcttatatctccattctactcactacaacagaaaagctggaactggcctaraagtaaaatcagaatagagagatacttgtaggctacttatytggagacatgaaggtcttcagccagaccttacagagaattacttcacttactcaggtaacgtttatggagccatttcactgtgctgtgtactggaaatawaatagaaaataaaaaaatacaccaggggacaaaaaataacaaatgcctgctctcatggaatttccagtttggggagaagactgacattaatcaaaggaatgcaattatgactacatggctataaactgagataattctctgaagaaagaagcacagtttacttaatgttgattaaaataaaggggtggcatggagtactctgggatgtcagagacttccctgagtgacagatgcctgacctaggacttaaagaataattagtcattaattaggcaaagactgggggatagggggagtaggtaagaagcattccaaaatcaaaataagcccaatgtgtctggagggcaaagatacaggaagagaggggaggtttaagamaagagggtgggcagggcttgctaacatatttaggctcatagacctcaatataacagcaatggaaaaatcactgaggtggctttaagtggtgtagaagagaccaggcagggagggggaaaaattctcattctaaaaagatcattctggcttcactatggagaacacagatgggagaatggtcaggatagacctgtgagaaaattagtgagttatatagtagtgaaatagggaggtgggagaatgatagagagaagcaggtagatttgagacctatacaggagataaaattgatggtacctgataagttattgaggataaaattagatatgggggaattgggaaaaataaagtattcagaacttctaagtttctggctttggcaactagttagattgtggtaccaacttgttcaaaaacggaaggctggaagaggatctggtttgaaatgaaagcatgttccatctcagatatgttgatgattatttcactggctgaattattttgtacaatgagagaaaaggttcccgtgggaccagaagacctaggatcaagttctgggttcagacattataaacaggactctgattttaacaagtcacaatttgtaggcatcggttttctgaggcttatttcattgacttggactacatcacctgcagttctttcctaagctttggagactaagagcttgcacaagtcattggataatcatccttttgatctgattaaagaaactacatgtaaataagctcacattaaatattgtgagctattaaatattgttaaaatatgaatgcttaaatttgccctcctattacagcaggctctccaaatccacagttctgcatctgaagatatgaccaactgtggattgaaaatatttgaagaaaaaaaaacaatttaaaaagccaatacaacaacaaaaaatacagtacaacaaataaaaaatacagtacatgctatttacatggcatttacattgtattagctattgtaagtaatctagaaatcatttttgttgttaaaacttatactttattttcttgaatgtttatattatgctttttgtcactatccatactgtttttaagcctgagccactgtgtggtttcagcctcaatataataatcatcccctcacttttagaattccttttcccttatcactttgctttgtaaggtttctataaaacaaagaccttggaaaatcaacatttcctgtgaactcaagagattatgtaagcagtgcccaaatcagcaggattaggcaggtaaaagcagttggatggcagatacactatgatctctttgaccacaatgtagttgtatgcatgtctaaaaggtcatactgattcaccattagaataaagatcacatgtaggttgaccagggaggactatccacagaattgtgtgaactgtggtaggggaggcagtatacaacattcatggatgaaacacctagctaactgctttcctaaaaattatctattgtctaaaagacaaacatctaggctttttagtgttttttttttttcctttaacttatgaagattcaagtcactaatatgttagttcttctggtttaaaatgaaagtaactggctatggtaatgtagagaagacagatgactgcatcaatatttaagacttaaattttgagttacctcaccttataaaaatatatatcaatataytaaatactcaacaaagatccaggatgtacagtatttaaaaatacatttctcttggatcagcaccaaaaataatcagtttctgttcaacttgtgtcaagttttttttttgtcggttttttgaggctgagtctcactttgtggcccaggctggagtgcagtggtgcgatctcggcttactgcaacctctgccttccaggttcaagcgattctcatgcctcagcctcccaagtagctgggattacagacatgtgccacgatactcagctttttatttttatttttacttttattttgtatttttagtagagacagggtttcaccatgttggccaggctggtctcgaactcctgacctcaagtgatctgcctgcctcggcctcccaaagtcatgtcaagtttttaggtctaggcaagttaaaattatctctgataaaaatcacgagctccacaaaaataattaaagatatatccaaacatctttcaaatacattctgatatcaggtcaggcatttcactttaaagaacataatagtaactaccttaccactgaatttttgtagtaagacgttttaaatcaactttgtcttatgggaatattttatatcttgcacgaaggagccactggtacttagacacctaaaattactagaaccattaagactgaggtgaagaatttgtatagccttccaccattacaaagaaggagtgatagatacttgtcctcctggcaatatcaaatgccgtttctttgaagttgtttttcagccctggtttgatgtaatggttcatcaggaggagttctaggttatctttgctgtctcctttcccagcagcaagatgcaaaggggtcaagaggctttggtttgattaactgggtgtggcggcgtgtgcctgtagtcccagctacttgggaggctgaggcaggaagatagcttgaacctgggaggtggaggttgcagtgagcgcagattgcaccactgcacccaagcctgggygacagagcaagactctgtctcaaaaaaaaaaaaaaaaaaaaaaaaaggcttttgtttgggcattgatatctgcatcacactgaggtaagaaagaagccactctggtaccacttgcaagtactgtgcaggggtgtccagccatccgccatcactgcatgaacatctgcctcttgtgctatcagctcagggacctaagtgtccactgcaggctacttaatgaacactagggataaagatatactcatggcttccagtctgacccagcacagtcccagtggtggtagccacaggggtgactctgtcaccccaccccacctccaggtgaattagcacagagaaagagagagagagagacacacacacacacacacatatatacacatacacacacacacacactctgactcagtttgtctgggagaaagtaagcgaagagaaccagagtctctgcctggtaatccagagaattcatccaggtcttatccgaaactaccaaggtggtaactctacaaatccgcaagaaccacaggttactgggcttgggrtgccccctaaggcagacacggcttagatctcaatacccaagttcaaatacctggaaagccttcctaagaagagtgggtaaaaaaaaagtctagactgcaaagactacagtaaatacctgactcttcaatgcccagacaccaacaaacatccgcaagtatcaagaccatccaggaaaacatgacctcaccaaatgaactaaacaaggtagcaaggaccaatcttggagaaacagagatatgtgactgatatggtttgaatctgtatccccaccaaatatcatgtcaaattataatctccaatgttggaggtggggcctggtgggaggcgactggatcatgagggtggtccttgaygaatggtttagagccatcccctcggtactgttcctccygatagtgagttatcgcaagatctggttgtttagaagtgtgtagcagctctccgcccctcttcctcctgcttctaatcatgtgagacgtcttgctcccactttgacttccaccatgattctaagtttcctgaggcacccccagaagtcgagcagatgtcagaatcacgttacctgtacagcctgtggaaacataggccaattaaacctcttttatttataaatttcccagtctcagatatttatagcaatgcgagaatggactaatacagtgacctttcagacagagaattcaaatagctgttttgagaaaactcaacaaaattcaagataacanggagaaggagttcagaattctatcagaaaaatttaacaaagagatttaaataattaaaaaagaactacgcagaaattctggagttgaaatatgcaactgacatattgaagaatgcatcagagttttttaatagcagaaggatcaagcagaagaaagatttagtgagcctgaagacagactatttgaaaatacagtcagaggagacacaagaaaaaagagtaagaatgaagtacacctacaagatctagaaaatagcctcaaaagggcaaacctaagagttactggtcttcaggaggaggcagaaaaagagataggaatagaagatgtatttaaaaaaaaaagtttattcaaagaaataatagcagaaacctaggaaaggttatcaatatccaaatataagaagattacagaacaccaagcagatttaacccaaagaaagctatctcaagccatttcataatcaaattcccaaaggtcaaggataaagaaagaatcctaaaagcagcaacagaaaagaaacaatatacaactgaactccaatacatttggcagcagattttcagtggaatccttacaggccagaagagagttgcataacatatttaaagtgctgaaggaaaaaaacttttaccccagaataatttatctggctaaaatatacttcaaacatagagaaataaagactttcccagacaaacaaacactgagggatttcatcaacaccagatctagcctagaagaaatgctaacaggtgtacttcaatcagaaagaaaaggacactaatgagcattaagaaattatctcaaggtacaaaactcactggtaacagtaattatatagagaaacacagaataacactgtaactgtggtgtgtaaattactcttattttaagtagactaaaagataaatcaaaaataactacaacaacttttcaagacacagacagtacaataagatataaataaaamcaacaaaaagttagaaagcagggggatgaagttaaggtgtagagtttttattagttttctttttgcttgtgtgtttatgmaaacagtgttaggctatcagtgtaaaataataggttataagatagtatttgcaagcatcatggtaacctctaatcaaaaaacatacaacagatacgctgaaaataaaaaataagaaattaaaatcataccaccagagaagattaccttcactaaaaggaagacagggaggaaggatggaagacaagacccataaaacaaccagaaaataagtaacaaaatggaaggaataagcccttgctcatcaataacaacactgaatgtaaatggactacattctccaataaaaagacagagtggctgaagggattaaaaaaacaaaaaacaaaaaaacaagactcagtgatctgttgccyacaagaagcacatttcacctacaaagacacacatagactgaaaataaaaggatggaaaaacacattccatgacaatggaaatcaaaaaagactaggagtagctatacgtatatcagacgaaatagatttcaagacaaaaactataagaagagacaaagaaggtcactatataatgataaagggggcaattcagcaagaagatgtaacaattgtaattgtatatggacccaacactggatccatataccagtgttggagcacccagatacataaagcaaatattgttacagctaaaaagagagacagaycccaatataataatagctggtaacttcaacatcccattttcagcgttggacagatcttccagagagaaaatcaatgaacatcagacttaatctgtaccaaatggamctaatcagaccaaatggacctaatagatacatacataacatttcatcccaaagctgcagagtacacattctttttcctcagcacatggatcattctcaaggatggaccatatgttatgtcacaaaacaagtcttaaaacatttwaaaaaactgaaataatataaagcatcttctctgaccacaatagaataaaactagagatcaataataagtggaattattgaaaattttcttgaaataaatgataaaggaaacacaacatacgaaaagctatgggatacaacaaaagcagtactgagaggcaagtttatagctataagtgcctacatcaaaaaagaaaaaaacctcaaayaaacaactatttaatgatgtatattaaagaactagaaaagcaagagcaaaccaaaccccaaattagtagaagaaataataaaaatcaggccaggcgcagtggctcacgcctgtaatcccagtactttgggaggctgagacaggtggatcacttgatgtcaggagttcaagacaagcctggacaacttggtgaaaccccatctctactaaaaatacaaaaaaattagccgggcatggtggtgtgcacctgtaatctcagttactcgggaggctgaggcaggaggatagcttgaacctgggaggtggaggttgtagtgagccgagattgtgccactgcactccagggtgggcaacagagtgagatttcatctcaaaatacaaaacaaaacaaaaaataaagatcagagcagaaataagtgaaactgaaacaaaaaaaatacaaaacttcaatgaaacaaaaggtttttttttttttgaaaaaaaaaattgacaaactgctagacagactaagaaaaagagaagacacaactaagtaaaaccagagataaagaaggamacattcaactgataccacagaaattcaaaggatcattagtggctgctatgatcaactatatgccaataaatgagaaaatctagagaaaatggataaattcctagatactacaacctaccatgattgaaccatgaagaaatccaaaacctgaacaaaccaataacaagcaacaacatcaaagccataataaaaaatctcccagtaaagaaaagcctgggacctgatggcttcactacagaagtctaccaaacatttaaagaacgaataccaatcctactcaaactattctgaaaactagaggaggagggaataattccaaactcactctatgaggcctgtataccaaaatcaaagacatattacatattaaaagaaaaaaaattacagaccaatatcactgatgaaaattgatgcaaaaatcctcaacaaaatactagcaaaccaaattcaacaacacattaaaaagatcattcatcatgactaaataggatttatcccagggaygcaaggatrgttcaacatrtgcaaatcaatcaatctgatatatcatcatatcaacaaaatgaagaacaaaaaccatatgatcatttcaatggatgcttaaaaagcacttgataacattcaacatcccttcataataaaaaccttaaaaaaacttggtatagaagaaacatatcttaatataattacaccatatatgacagactctcagctagtatcatacygatgaggaaaaaaaaaaacctttcctctgagatctggaatacaacaaggatatccactttcaccactgttattcaacacggtactagaagtcctagctagagcaatcagacaagagaaagatataaagggtatccaaattggaaaggaaggagtcaagttatccttgtttgcagatgatatgatctcgtatttggaaaaacctaaagactccaccaaaaaactattagaactcatacaaaatcagtaaagctgcaggatacaaaatcaacctacaaaaatctagcatttctataggccaatagcaaacaatctaaaaaagaaatcaakaaagtaatcccatttacaataactacaaataaaattaaatacctaggaactaaccaaataagtgaaaagtccctacaatgaaaactaaaacactggagcaagaaattgaaaaggacacaaaaaactggaaagacattccatattcatgggttggaaractcaatattgttaaaatgcccattctccccaaagcaatctacagatttcatgcaatccctataaaaataccaataatgttcttcacaaaagtagaaaaaacaattctaggccaggcgtgatgcctcatgcctgcaatcccagtgctttgggaggccaaggtgggcagatcacttgaggccaagagttccagaccagcctggccaacatggtaagacatcgtctctactaaaaatacaaaaattagccaggtgaggtggcgactacctgtaatcctagctactcaggaggctgaggcacaagaatcgcttgaacctgggaggcagagrttgtagtgagccaagactgtgccactgcactccagcctgggcgacacagtcagactctgtcccgccccccaacccccccaccaaaaaaaaaagaaaagaagagaaaaaaacaaacctaaaatttacatggaaccacaaaagacccagaatagccaaagctatcctgaggaaaaaaacaaaacgaggaattttattacctgacttcaaattatactacagttagagtaaccaaaacaggatgatactggcataaaaacagacacattagaccagtgaaacagtctaataargaatgcagaaataaatccacacatttacagtgaactcactttagacaaaggtgccgagaacatacaatggagaaaggacagtctcttcagtcaatggtgctgggaaaactggatatctttacgcagaagaatgaaggttgaccccgtatctcttaccatataaaaaaaaaaatcaaatgaaaatgggttaaaaacttaaatttaagacctcaaactatgaaactactaaaagaaaacattggggaacctctccagaacactggagtgggcaaggatttcttgagtaataccccacaagcacaggcaaccaaagcaaaaatggacaaatgggatcacatcaagttaaaaaccttctgcacagcaaaggaaactatcaacaagagacaacccaaagaatgggagaaaatattttgaaactacccatctggcaagggattaatatccaaaatacataaggaagctcatgcaactctacaggaaaaaaaatctaatcatccaatcaaaaatgggcaaaatatctgaatagacatttctcaaaagacatacaaatggcaaacaggtatacgaaaagctgctcaacatcactatcagaggaatgcaaatcaaaactacaatgagatataatctcatcccagttaaaatggcttttatacaaagacaggcaataataaatgctggcaaggatgtggagaaaggggaacccttgtagacagctggtgggaatgtaaattagtacaaccactatggagaacagtttggaggttcctcaaaaaactaaaaatagagctaccatatgatccagtgatcccactcctaggtatatacccaaaataaaggaaatcagtatatcgaagcgatatctgcacttccacgtttattacagcactattcacaatagctaagatttggaagcaacctaagtgtccatcaacagatgaatggataaagaaaatgtggtacttatacataatggagcactattcagccataaaaagaatgagatcctgttgtctgcaacaccgtggattgaactggaagtcattatgttaagtgaaataagccagacacagaaagacaaacttcacatgttttcacttatttgtgggagctaaaaattaaaacaactggtcaggcacattggctcacgcctgtaatcccagcactttgggaggccaaaacgggcagatcacaaggtcaggagttcaagaccagtctggccaatacggtgaaaccctgtctctactaaaaatacaaaaaaattagctgggcgtggtggtgggcacttgtagtcccagctactcaggaggctgaggcaggagaatcacttgaacctgggaggtggaggttgcagtgagccgagatcgcaccactgcactccagcctgggcaacagagcgagactccgtctcaaaaaaaaaaaaaaaaaattaaaacaattgaactcatgaacatagaaagtagaaggatagttaccagaggctgagaagggtagaaggtaggatgggggaaagtgggaatggttaatgggcacaaaaaaacagaatgaataagacctagtatttgctagcacaacagggtgactataggaaaaaaataatgtaattgtacattttaaaataattaagagtataactggattgtttgtaacacaaatgataaatgcttgaggggatggatacctcatcttccatgatgggattattatgcattgaatgcatgtataaaaatatctcatgtaacccataaatatatacatctgctatgtatccacaaaaattaaaattttttaaaaatgggtagggcacggtggctcatgcctgtaatcccaacactttgggaggccaaaacgggtggattctttgagcccaggagtttgagaccagcatgagcaacatagcaaaaccccatctctatgaaaaaatataaaaattacctcagtgtggtggcatgcaactgcagtcccagcaactcaggaagctgaggtggagggtggcttgagcctgggaggtggaagttgcagggagccaagactgtgccaccattactccagcctgggcgacagagccagaccctgtctcaaataagtaaatggtactgaaaaaaatgttgtagtgagacaaaaaaggtttttttggtagacaacacttaaatctctacaaaaaatacaaaaactagccaggcatggtagcccatgcctgtagtcccaactacctgggaggctcagtaggctaaggcaggaggatcccttgactccaggaggttgaggctacagtgagcgttgaccgggccactgcactccagctttggtgacaaagtgagactttgtctcaaaaaacaagagagatttcataccaaatggttcataaagatgcaaaactgctacgtagagtttccatatgttttgtaacagaaaatgttaggagtaagatgatgtgtgtggtatcactccttacactccaagtcattagcttgcttctttgacagtacctgctactaagatctgactttttataaaagtaatttatgctccttgcttgtcagcatagataccttttcaaagtttttataaggtaagtgacttataaaattttatctggaaaaaaacccactaggctgttacggaagtttaagatcaaacatactgtgctaccattttgaaaaaaggtgagaaattagaaaaaggttagtcctattagaaattctcttataacgttatgacaatcatcaaaagtatagcagcatayaaacaagttgctaggaaaaaaagagaaagcccacagacactagtatatgtaattacttagcaygtaataaaaggaaaattagaaaacagaaagggaatgtttattcaataaacacagactggaacatgtggctggtttttgaaaaataatctactcagatccttaccctacagcaaaataaattccaagtatatcacatctctatctactctctatccataagatacaaacaacatataaaaagtgatttaaatttactaaatatggccggcacaatggctcacgcctgtaattccagcactttgggaggccagccagatcacttgaggtcaggagtttgagaccagcctggccaacatggtgaaaacctgtctctactaaaaatacaaaaactagtcaggcatggtggcacaagcctgtattcccagctattcaggaggctgaggcacaagaatcgcttgaacctgagaggcagaagttgcagtgagctgagattgtaccactgcactccagcctgggcaacagagtgagactccatctcaaaattaatgaatgaattaattaaatatgtaataagtaactttaatacacattaaaatacattttaaaagttaattcataaaaaatattttagaagatattatcaatgtcacatttttaattttaatttttatttttgagacagggtttcactctgtcacccatgctgcagtgcagtggcacaagcacagctcactgtagcctcaacctccagggctcaagcaatcctcctgcctcagccttccaagcagatggaattgctggcatgtgcctccacatccagctaatttttattattttatttgtagagacggggtctccctgtattgcccaggctggtctcgaggtcctgggctcaagtgatcctcccacctcagtctcccaaagtgttgggattagaagtgtgaaccaccatgcccagccaataactatcaaatctatgaatatgaatagagtgaaactgaaattacaatgaaataaaaaggaaaatattaattcaactacaaaaaaaatttaaatctcctgtgcatcaaaaggaacaccaccaaaagtggaaaggcaagaataaactaatgaaaatatctacagcttgagacaatcagacattatgccctcctgataggatgcactatgaactatataaaaccactaataaaatatttattctttcccccaaagaatgttgaacctgaatctaattaagactttagaggaaagttcttaagaaatccaggagatagagcaacaagttaaccaccaagaaatagacaataaacaaagaatccaaaatatgggacattctacagggaaaataacctagtttcttgaaaaaatcaaaagcataaaaacaaagggaaggggaatcagtttttagacaatcgcccccaccacagacacacagaagcttctcagtccattcataataaactaaaaagtccttatcagagccagagcctacatccttgggattttatcctgtgaaaaagaatccaaaaaaactaaaaaattcacgtacaaaaagatgatgttagcagcatgttttttcatttcctttcctatttatctatttttatttctttttccaacttttattttagatacagggggtacaggtgcaggtttgctatttgggtatattgtataatgctgaggtttggggtacaaatgttcccacgtcacccaagtattgaatataatacccgtttttcaaccattcccctccttcctttctcctccatctaatagtccccagtttctgttgttgccatctttatgtctatgagtacccaatgtttagcttccacttacaaatgtgaacatgtggtatttgacagcatggttttaacagtgaaaaattataaatgacaaaagaatgttaagcaaattaaggcatacccaraatgtaatattatacagcctctaaaatgtatgtagtaatgaaaaggatatataataatgaaaagtacatatttcaaatgtttagtgaaaaatcaggataaaaggatatatgggccaggcgcggtggctcacacctgtaatcccagcactttgggaggctaagccaggtggatggcttgagcccaagagtttgacaccagcctgggcaacacagtgaaacccatgtctacaaaacaaaataaaacaaacattagccaggtatggtagtacatgcctgtagttccagctactcaagaggctgaggtgggaggatcactcgaggtagaggttgcagtgagtcaggatcacaacactgcactccagtatgggtgagagagtaagacactgtctccaaaaaaaaaaaaaaaaaaaaaaaaaaaaaaaagtgggggaatatgtaaggtaacaagaaaatctacacaaaagctttaaaaatggaaaggaaatacagtgaaatattaacactgtatggctagtgtttgtactttcaagttattttttctttgctttctagttttaataaccaggcattttctgtgattttaaaaattctttctcaaattagaaactatatatatatgctatatatatgacccatataataacaaatctaggtaagttggctttatgttacagcatatttgtttttcccatttcaaaatgttatttattaagcacggtgtcgttctataaccattttctgaacatttccccaaatctttaccaaaacaaagctctcttaaattctttctccattatatttctttycaactcctccctgagtaatacatatttagtgggaataaagtttttattttggccaggtgcggtggctcacacctgtaatcccagcactctggaaggctaaggtgagtggatcacttgaggtcaggagttcgagaccagcctgaccaacatggtgaaaccacatctctactaaaaatacaaaaattagccaggcatggtggtacgcgcctgtaatcccagctcctcaggaggctgaggcaggagaatcgcttgaaccaggaggcagatgttgtagtgagccgagatcacgccactgcactccagcctgggagacagagcgagactccatctcaaamaatttttatttccaagagtataaaattattctgcatttaaaagcaacattataaccccacatctaaaagacccagggaggagtgaaaaacatttgttggaagtgtactttctgtatactaagtttccttgttctataaaaatatggtaatatttgtttgatacattcgacaaccgcaaccaaaatttattttgagtttacagtccgcaacatgaatttctaaaaatatcatactaacattcaagtttaattggcacagacatatctgctatgtttaacagaaacaaagagtcacacatggggaatgacagttctgagtttttctctctttccagcaaatatgcttcattagccattacgcttttttcctctagagtttctctgaggtcactgccatgttgcttcctatcagacaagttaacactgaggaacctgtgcctgtgtgcaatctcagcagatttgcacttattgttgtgttacttttcttttttttacatacacattgttaaacatatatctaaggccagagaaaaagggaaaagtataatgaactcccatgtactcactacccagcttcaataattatcaatagtttactattcttgttttatctactcccctcccaactttttaagacagggagcaggcattgaagtattttaaaagaaatcttagacatgattagatgaaaatttccggctagcaaactaaaaagttttttgttttgtttttgagacagagtctcggtcacccaggctggagtgcagtggcacaatcttggctcactgcaacctctgcctcctgggttcaagcgattctcctgcctcagcctcctgagtagctggaactacagacacatgccaccaagctggctaatttttgtatttttagtagagatggggtttcatcatattggtcaggctggtcttgaaattctgacctcgtgatccactcgccccacctcccaaaatgctgggattacaggcgtaaaccactgcacccggcctcaaactaaaaagtttgttttgttttttgagacggagttttgctctggttgcccaggctggagtgcaatggtgcgatcttggttcactgcaacctctaccaccgggttcaagcaattctcctgcctcagcctcccaagtagctgggattacaggcacctgccaccaagcctggttacttttttgtatttttagtagaggcagggtttcaccatgttggccaggctggtctcaaactcctgacctcaggtgatccaccaacctcggcttcccaaagtgctgggactgaaggtgtgagccaccgcacccagcctctaaaaagttttaaaggcatttgtcttctttcgcttaaaacgtaagatattaaaaatattaaaatattaaacttaacatctaatatagttcacattagaatccagccaggcacagtgggacacatttgtaatcccagtgctttgggaggccgaggcaggaggatcacttgagcgcagaagttcaagaccagcctgggcaacaaagtgaaaccccacctctacaaaaaaagttttaaaaattagccagacatggtggcatatacctatagccccagctattcggaaagctgaggtataggatcacctgagcccaggaggtcaaggctgcmgtgagctgtgatcgctctactgcacagcagcttaggcaacatctgtctcaaaaaacaaaaaaaaaagaagaagaaaaaaaaaagaatttaagcgactctctcaccagaagcagaacccacagtatctaagaccaggttcttttcctggcaagacatactgccactttaaaaacttgactacatcacaagacctcttggactcctgaacctagttcaataaacaaataaatgtttagatcatactcgttttgtcaaacaacaataaataaataaatttcctgtataattttcaactcatgagaacctgacattttctcaaatgttgtgttatacaccagagcagaatctgtaaattaatcaaacctcttcctcctttgggtaaaaggacagacctttcaacaagtgtgctttcaaggagaccaatttaattaattaatggctatgtatttttctaaggtcagaactacagtccccatatgcagagaatatattattgggtacagctgaaaactggttccttttggcataacatcaataaacagagtactactgaaagccaagggttttttttcctttagagactgggtcttgctttgtcaacccaggctggggtgcagtggtacgatcatagctcacagcagccttgaacccctgagctcaagtgatcctcctgccttagcctcctgggtagctcggggtacaggcacctgccactatayctggctaattctttaaaaatttttttagagacacgaagtctcgctttgttgtacacgctgtttctgaaytcctgrcytcaggtgatccttccgagtggacctcccraagtgctgggattacaggcatgagccaccatgcctggccaagttcatttttaaattctgactttagtaagaaagtttagaaatgagagataaaatgtagcatctgcccctatcagcaatgataaccaagtcttcttgttatcgtaaaacggcactgactttttccttaattctaagaaaaggaatcctgattttttaaaaaatgtgcataaaacttaaggttacaatttttaaaattattctgaaacaaatattattattttaattacgctatctatatggctctaattttctattctttagaaaattattactttcttgggtcctatgggtttccataaaaggccattctttttttttaatgtgactattttttttaatttttatttttattttaagttccagggtacaggtgcaggatatgcaggtttgttacacaggtaaatgtgtgccatggtggtttgctgcacctatcaacccatcacctaggtattaagcccagtatgcactaaatatatttttcctaatgctctcttcccccatcccaacctccaacagaccccagtgtgtgttgttcccctccctgtgtccatgtgttctcactattcacctcccatttgtaagtgagaatatgcagtgtttggttttctgctcctgtgttagtttgctgaggataatggctcccaggtcccagtctatcattgatgggcatttgggttgattccacgtctttgctactgcagatagtgcttcartgaacatacgcatgcatgcatctttgtaacaggatgatttatattcctttgggtatatacccagtaatgggattgttgggtcaaatggtatttctggttctagatctctgaggaatcataaaaggccattctttttttcttttttttttaaattttattattattatactttaagttttagggtacatgtgcacaatgtgcaagtttcttacatatgtatacatgtgccatgctggtgtgctgcacccattaactcatcatttagcattaggtatatctcctaatgctatccctcccccctccccccaccccacaacagtccccagtgtgtgatgttccccttcctgtgtccatgtgttctcaytgttcaattcccacctatgagtgagaacatgtggtgtttggtttttggtccttgcaatagtttgctgagaatgatggtttccagtttcatccatgtccctacaaaggacatgaactcatcattttttatggctgcatagtattccatggtgtatatgtgccacattttcttaatacagtctatcgttcttggacatttaggttggttccaagtctttgctattgtgaatagtgccactataaacatacgtgtgcatgtgtctttatagcagcatgatttataatcctttgggtatayasccagtaatgggatgkctgggtcaaatggtatttctagttctagatccctgaggaattgccacactgacttccacaatggttgaactagtttacagtcccaagaacagtgtaaaagtgttcctatttctccacatcctctccagcacctgttgtttcctgactttttaatgatygccattccaactggtgtgagatggtatctcattgyggttttgatttgcatttctctgatggccagtgatgatgagcattttttcatgtgtttttttggctgcataaatgtcttcttttgagaagtgtctgttcatatccttcgcccacttgttgatggggttgtttttttcttgtaaatttgtttgagttcattgtagattctggatattagccctttgtcagatgagtaggttgcaaaaattttctcccattttgtaggttgcctgttcactctgatggtagtttcttttgctgtacagaagctctttagtttcattagatcccatttgtcaattttggcttttgttgccattgcttttggtgttttagacatgaagtccttgcccatgcctatgtcctgaatggtattgcctaggttttcttctagggtttttatggttttaggtctaacatttaagtctttaatccatcttgaattaatttttgtaaaaggtgtaaggaagggatccagtttcagctttccacatatggctagccagttttcccagcaccatttattaaatagggaatcctttccccattgcttgtttttctcaggtttgtcaaagatcagatagttgtagatatgcggcattatttctgagggctctgctctgttccattgatctatatctctgttttggtacccgtaccatgctgctttggttactgtagccttgtagtatagtttgaagtcaggtagcgtgatgcctccagctttgttcttttggcttaggattgactcggcgatgcaggctctttttctggttccatataaactttaaagtagttttttccaattctgtgaagaaagtcattggttgcttgatggggatggcattgaatctataaattaccttgggcagtatggccattttcacgatattgattcttcctacccatgagcatggaatgttcttccatttgtttgtatcttcttttatttcattgagcagtggtttgtagttctccttgaagaggcccttcacatcccttgtaagttggattcctaggtattttattctctttgaagcaattgtgaatgggagttcactcatgatttggctttctgtttgtctgttattggtgtaaaagaatgcttgtgatttttgcacatcgattttgtatcctgagactttgctgaagttgcttatcagcttaaggagattttgggctgagaygatggggttttctagatagacaatcatgttgtctgcaaacagggacaatttgacttcctcttttcctaattgaataccctttatttccttctcctgcctgattgccctggccagaacttccaacactatgttgaataggagtcgtgagagagggcatccctgtcttgtgcctgttttcaaagggaatgcttccagtttttgcccattcagtatgatattggctgtgggttgtcatagatagctcttattattttgagatacgtcccatcaacacctaatttatagagagtttttggcatgaagggctgctgaattttgtcaaaggccttttctgcatctattgagataatcatgtggtttttgtctttggttctgtttatgttggattacatttattgatttgtgtatgttgaaccagccttgcatcccagggatgaagcccacttgatcatagtggataagctttttgacgtgctgctggatttggtttgccagtattttattgaggatttttgcatcgatgttcatcaaggatattggtctaaaattctctttttttggttgtgtctctgccaggctttggtatcaggatgatgctggcctcataaaaagagttagggaggataccctctttttctactgattggaatagtttcagaaggaatggtaccagctcctccttgtacctacctctggtagaatttggctgtgaatccatctggtcctggactttttttggttagtaagctattgattattgcctcaatttcagagcctgttattggtctattcagagattcaacttcttcctggtttagtcttgggaggatgtatgtgtcaaggaatttatccgtttcttctagattttctagtttatttgcgtagaggtgtttatagtatctctgatggtagtttgtatttctgtgggatcggtggtgatatcccctttatcattttttattgcgcctatttgattcttcttttcttctttactagtcttgctagcggtctgtcaattttgttgatcttttcaaaaaaccaggtcctggattcattaattttttgaagggtttttttggtctctatttcctccagttctgctctgatcttagttatttcttgccttctgctagcttttgaatgtgtttgctcttgcttttctagttcttttaattgtgaygttagggtgtcaattttagatctttcctgctttctcttgtggacatttagtgctataaatttccctgtacacactgctttgaatgtgtcccagagattctggtatgttgtgtctttgttctccttggtttcaaggaacatctttatttctgccttcatttcattatttacccagtagtcattcaggagcaggttgttcagtttccatgtagttgagtgtttttgagtgagtctcttaatcctgagtcctagtttgattgcactgtggtctgagagacagtttgttataatttctgttcttttacatttgttgaggagtgctttacttccaactatgtagtcaattttggagtaggtgtggtgtggtgctgcaaagaatgtatattctgttgatttggggtggagagttctgtagatgtctattaggtccacttggtgcagagctgagttcaattcctgggtatccttgttaactttctgtgtcattgatctgtctaatgttgacagtgrggtgttaaagtctcccattattattgtgtgggagtctaagtcactttgtaggtcactaaggacttgctttatgaatctgggtgctcctgtattgggtgcatatatatttaggatagttaactcttcttgttgaattgatccctttaccattatgtaatggccttctttgtctcttttgatctttgttggtttaaagtttgttttatcagagactaggattgcaacccctgcctttttttgttttccatttgcttggtagatcttcctccatccctttattttgagcctatgtatgtctctgcacgtgagatgggtttcctgaatacagcacactgatgggtcttgactctttatccaatttgccagtctgtgtcttttaattggagcatttagcccatttacatttaaagttaatattgttatgtgtgaatttgatcctgtcattatgatgttagatggttattttgcttgttagttgatgcagtttcttcctagccttgatggtctttacaatttggcatgtttttgcagtggctggtaccggttgttcctttccatgtttagtgcttccttcaggagctcttttagggcaggcctggtggtgacaaaatctctcagcatttacttgtctgtaaagtattttatttctccttcacttatgaagcttagtttggctggatatgatattctgggttgaaaattcttttctttaagaatgttgaatattggcccccactctcttctggcttgtagaatttctgccaagagatcygctgttagtctgatgggcttccctttgtgggtaacccgacctttctctctggctgcccttaacattttttccttcatttcaactttggtgaatctgacaattatgtgtcttggagttgctctctcgaggagtatctttgtcgcgtcctctgtatttcctgaatttgaatgttggcctgccttgctagattggggaagttttcctatatcctgcagagtgttttccaacttggttccattctccccgtcactttcasgtacaccaatcagatgtagatttggtcttttcacatagtcccatatttcttggaggytttgttcacttctttttattctttttgctctaaacttctcttctcgcttcacttcattcatttcgtcttccatcactgataccctttctgccagttgatcacatyggctactgaggcttctgcattcgtcacgtagctctcgtgccttggttttcagctccatcaggtcctttaaggacttctctgcattggttattctagttatccattcatctaattttttttcaaagcttttaacttctttgccattggtttgaacttcctcctgtagctcagagtagtttgatcatctgaagccttcttctctcaactcgtcagtcattctttgtccagctttgttccgttgctggtgaggagctgcgttcctttggaggaggagaggcactctgatttttagagtttccagtttttstgctgtttttttcccatctttgtggttttatctacctttggactttgatgatggtgacgtacagatgggtttttggtgtggatgtcctttctgtttgctagttttccttctwacagacaggaccctcagctgcaggtctgttggagtttgctggaggtccactccagaccctgtttgcctgggtatcagcagcagtggctgcagaacagcggatattggtgaaccrcagatgctgctgcctgatcgttcttctggaagttttgtctcagaggagtacctggccrtgtgaggtgtcagtccacccctactggggggtgcctcccagttaggctactcgggggtcagggacccacttgaggaggcagtctgcccgttctcagatctcaagctgcatgctgggagaaccactactctcttcaaagctgtcagagagggacatttaagtctgyagaggttactgctgtctttttgtctgtgccctgcccccagaggtggcgcctacagatgcaggcaggcctccttgagctgtggtgggctccacccagttcgagcttcctggccgctttgtttacctaatcaaacaactaacttggcaatgacaggtgcccctcccccagcctcactgccaccttgcagtttgatctcggactgctatgctagcaatgagcgagactccctgggagtaggaccctccgagccaggtgcgggatataatctcctggtgtgccattttttaagcccgttggaaaagcacaatattagggtgggagtgagccgattttccaggtgccctctgtcactgctttctttgactaggaaagggaattccctgaccccttgcgcttcccgggtgaggtgatgcctcgccctgcttcggcttgcgygtggtgcgctgcacccactgtcctgcacctactgtctggcactccccagtgagatgaacccggtacctcagttggaaatacagaaatcacccgtcttctgcgttgctcacaatgggagctgtagacyggagctgttcctatttggccatcttggctcctccccccttttttttctttttttaagatgcagtctcactctgtcacccagrctggagtggagcagcatgacctcggctcactgcaacctccgcctcctgggttcaaacagttctgtctcagcctcccaagtagctgggactccaggcacctgccaccatgcccagctaatttttgtatttttagtagagatagggtttcacattgttggtcaggctggtcttgaactcccgacctcagctgattcacttgcctcggcctcccaaagtgctgggattacaggygtgagccaccatgcccagctaaaaggccattcttaattttcaaaagagaactttatgacatctgggaatttcagaggctttgcagaacaatattaagaaaactactgtttgctaggcttgaggtcaggagttcaagaccagcctgggcaacatagcaagaccctatctctattctactttaaataaaaaataaaaatagaaaacaagaaaagaaacctattgtttacagaataaagtgattctaggtctttcagtcaggtctgttttcttaacaaaatacacactgaagtgtaaaaatactgccgaactgtttatattccttcaagaatactagcagatgagtaaattggcaatatgattaaaaaaaagaaatatgcatgcctcttgacccagcagtttccttagaaatgtgacttgaaggaatcattaaaaatgtgtgcaaagattttcccactaggaggttctcctcaatgctgcttaaaataacaaaaaaatcaaaacaacctcagaatctatagtaagagaatctgtaaataaggatatacctgtaaataagggtgtaaagtacatggtattctagataatgtagatataaaatggaattatctccacaatatatcattgggtttaaacaggttaagacagcatccataatgattttactacatatgattagtaagacattaaatacaaatattaaaatcaaacaatatatattaaagttaattatacaggcatagagagtagagagacataatggctactaaatgtattagtagttatctctaaacagttgagktgctgttcatttttactttctttacattttcctgtattgcttaaattttctataaaatgcatatcagaatttaaaaatatagttatattcatattcatttttttcttttttcttttaagacagggtctcgctctgtcacccaggctggagtgcagtggcatgctcatggctccctgcagcctcaacctcctgggctcaactgatcctcctcccacctcagcctcccaagtagctgggattacaggtatgcaccagcacactaggctaatttttgtatttgttgtagaaacagggtttcaccatgtcacccaggctgatctcgaactttgtttttaaaggcaaaaagtaaacgtacaaattcaaggcataaggtgaataggaagtttagcaattgaaaaaaaataacctatctgactactaccctttaggtattttagagagtagggaaaaggagaagagagaaaaagaaagggctgaaasgtgggaacaatatacaacctattaaaaccagagaaactggggagctgtggtggcaaaaaaaaaaaaaaaaaaaaaaagacacagaaatgctcaccactttagccacatcaaaaccaatgcaggcaagaagctgctctgaagtctcccaacccttcagccaggcatggtagtagtcccagctattttggaggctgaggcgagaggactggttaagcccaggagtttgaagctccggtgagctatgatctcaccactgcactaaagcctgggcaaaagagatcccgtctcttagaaaaaaaagtctaaaaaccccaaacaaaagcaatcgcatagactagtcttaggagttcactaccttgataacagcgctagagatactcagacactgagccctttctaaaataatgtagacgtgtatcaaagaccagacagttttattgttcttttcagcaattcctcatagatggtgttcttaatttccttatacatatatgaatcagaacccaccccccaacccccttgttttctttttcctgggcttggagcaagaggcaattgcactggtgactctccacaatgacatgagttctcagttgttccatgaaagattattacagtgcaactacaagaacagcacaataagagaaatggttctcacctctttgatctacagaaacatgtagacctccagggcttaacagaaaaattttcctggaactcctaaactttaggcataagacccaaataacttcattcctagccttttagtttgtacccaggtatcacaaacttatttacaaagtttattctgacctatgcaaataaaattgggcactttattaaaacttctttgaatctattactcatgaataaaacatgaaaaatactcatactgatggataacactttacacaacactgaatcaactcccctttgcttgcctcctcctaaaggactggcttaatttcagtagtagaacccaaacatgaatcaatctcatgactaagcattaactatgcatccatttagcaaatgaaagtttattttagcatttgaaattctgtggttcttcaggaatatagccagataaatgatttttactaacaaatgcaactaacaccatttcatctcctctctaggaatgactgaagactcttgactatcatctattcagcacctggaagcattacctttttgtaatacgaaaagaaaaacagctgaaagaaagaaaatatacttgtcccttcaaatatagatcatataatcaaatacaccttaattcactggtaaatatgtcacttggaacataagttctaaccccagatgaaaaatgaaaagtaaactttctaccatcctcgtactgatagaaaattctcatgggagagtagggaaaaacagtcagtcttcggtctattttagttaaaccttcacattagtggaggaaacgatgaactcatggcaaattaagctaccctccctaagttatttttcctcaacaaatcaaactcaaagacaagcttacaaaactggaaacacagaataaaagaataaaagaggacactgtctcctatgccatattatagtccagaattagttaatctaattcaaagtattggcaaggatgttccatcaactagaccaggtatttatcattcattaccatgtactgcttaagcatgtaaagtagctgaaacacaaatattttggagttatctccagacaaagagtaaaaacacaagaaaaatgttaaaatcctattatgttcaaccgctgatgattttcagaatttacatctttaatttttattaacattaggaawgttttgcctatactgtttagcttaattaaagtgtaatggaaatgtaagaatctgacagcacttattaatatctgtttagcaattatacacttgaagtttaatcatggatttaagaatttcaataaaatagtgaaagaagaaataaaagaaaaaagaaaaacaacagtgaaagaaatagaatcaaggcattaatccaccaagaaaagsgttagctgtgtgttcactctgaccttgagtctattaccacatggaaattttttaggaattttacaacggaaggaaaaaagggaagaaaaaagagatactcttagtgctgctgctgccttccttctttactgttctattctccatatattcaaaaaatacttagtaatttttcccctaaaatgttgtaaatgtgcttactgatccaatcttactgttagaacatccatgaactatccttggccctcttcctcttctctatccacattctctcccttggtgatcttatctaaactcaaggatttaaatattttgcctccataatgtataattccagctcagtcttctctcttaactccagactcatacgtctaactgcctacttgaccagaatatcttacaggtgtctcaaactcagaatgtccaaaaatggattcctgagctgtgccaaccctcctccaacctatgcaacccatactatggtattctccagttaagttgatggtaattccatttttcttcaacttactgaagtttaaaacctttagagtcatctttgattcatcccctttctctcacaccccgccttttgataacaaaatcctattgtttcaatcttccaaatatgtccagaaattgactacatctcactatctccactgctactatgtggcctgagccaccaccatcatcccttacttaaattactgcaggcttcccaacagatcttcctgcttctacccttgaacctccctgcatacacacacacaatttagtcttaatacagcyagctgccaggatgatccttttaaaactaagtcagaggtctctctaccctgttcaaatcaggcaatggctccccccattctcttagagtaaaaaccaaagtcctttcaacaacataaggcccttcatgatggggcctcctgtggcttccccttctattattcattcctcttgttcactcctccagactctttagggttactcgaactcaccaggtgaccgcttgatgtttactttgggatacttttcccaaatatctacttggctaactcccttactttcttaagtctttgttcaaagatcacctctcagtgagggctaccctgaacaccttgtttaatattgcaaccagctcctttactaccaaaaagagagagtaaactatgcttagtgagctcatttcacctagcagagaccgtggaagaaagtactaagatcagagggagtattcttacgagaaaatagaataggagatttgctggaacctttgtcaagatcccagttatgttcagggatttaaaaagagaactccgtatgtaagggatgaagaaaagaggagatcagttaccaaaaaggatctatactcaggatctgtccgagtcacagatacacagctgcaccatactcatgtacgcatctcaagggggcaaagcccgcaatttaaagcacagcaaagcatttccttatccacatatcgcaaaagagaaacagcaagaaaatatatcccagctcaagcatagcatacacaaatacatttcacaataatttcctaagccaagcgtggtggcacacacctataattccagctacttgagaggctgaggaggaaggatcacctgagcccggaagttcaagaacagtctgggcaacatagtgagaccctgtctcaaataataataataacaacaacaacaatttatgctccacatgcctgcaacagttcatctctaggaaaaggggcttacttgagacttgatgcttacgtttaaaatatatatatacatattttgaaacctgattagccaacatctaaccacctcaatttatagtaaagaggactcctaaaactcaaacctgtttagcataacataaagtgacaaatagaaaacattgccwtttccaggaagaacaaaaaatcaataatttattcaaacatacattgagcgcctactatttgtcaggcctgtgacaggagctagtatggcattaagagtgtagtaactacagtcaaaatgaggtataaatatcaaacacatgagcattttttccctttgtaatagattcatcaatcatgctgacaatggctatatattctggaactttctccgtaagtttaagccacatcattcattcaacaaagttgcagtgagcatctattaagtgcaagcactgtagtagatgctgaaggactacaaatataaataaataacaggttacattaattgggtacttcccatataccccagactctgtacattatctcattcatcaacttagccaccattataaattaaatacttccctattttagagatgataaactattatgctaaactgtttccctcaagtagcttcaagtctagaagtcagaaagacatgcttagaaatcatattaatactatctggccagccctacctcattacyacccaaaagtccaataaataaaaatggcaatttatgtacccacaggtaaagagtacacacatttcatactacagaattgctttctaaaggataaatttaaattaaaataaatgggccgggcgcagcagctcatgcctataatcccagcacgttgggaggccgaggcaggcggatcacctgagatcaggagttccaagaccatcctgaccaacatggagaaaccccatctctaatacaaatacaaaattagctgggcgtggtggcgggcacctataattccagctaccaggtagggaggctaaggcaggagaatcagttgaacccgggaggtggaggttgcggtgagccgagatcgcaccattgcgcgccagcctgggcaacaaaggcgaaactctgtctttaaaaaaaaaaatgaaataaaataaaataaaataaaaggcttgtagttgtatacgatctgtgtaatgatagcagttttgtaagaaaaataaaatgaaagcaaataatagataatgaaagcaaccaatgactaatttctagcttcttcctttctaatctaaaaaagctgctctgtaataactttaattacttcagtgacaagacttctaattctgtccaactcatttcttcctmacacatgggaacaaaaccaggtgacttgtacaaaatgaaactatttaagtattcatctataaactgctttcctttttccttttttwttttttttaacaaattctaaatacttacgtagataaggcttcctctgcccctaagcaaactttctgcacaataactgcacctagcttggtgagacagatggagagcctgcaaagtctacaaactttttgtttaaaaggtggcaaatgagttctactgaccatcaaagtcagctaggtttctgggaagcactgaccctggggccatgttttttcaccttgcaaagccaaagcagacaatggagtcaaagctaaaagaagagaagccaaaggaagactggacttaaacatgaaaatccgtatcatacaaatttataacacaaacagcccacctttttcaacaccgccatcacagtgttaatctacaaaaaatggaaagactgatcctactctttctaaaatctaaatctatcactcaactaggtaaaatctcagcattttttaatgaactccaactgctaacctcctttgggggtaaaaacaaaaacaaaaactgaggattccattcctgtgtaaagcagagagttaatgtaagaagatcatactttaattgtaaagacaaagcagcaaagtttcttcctaaaacagaagcaggaacacctaagtgaactcaagttactattcagtgcaaaaagcagtcttacgaactttgagtttgtaagaccaattttcagaaacatttttgaatcctagataaacctactatcaatgatctgaagataatttaatttttaaaaataaaaggattatttactgtctctcttcatctacttcctaaatgatttcaagagatctcttggaaaccaataagaaacatgcaaatgccttttgcaaataaaaaaatttaagtcaacttttaatcatatgctctctaaattwaaaaaaaacttctttaatgaaagtgggccggttgtggtggctcatccttgtaatcccagcactttgggaggctgaggtgagtggatcacttgaagtcaggagttcaagaccagcctggccaatgtggtgaaacaccatctctaccaaaaatataaaaattagctgagcatggtagtgcatgcctgtaatcccagctactagggaggctgaggcaggagaactgcttaagcccagaggggcagaagttgcaatgagccagaatcacaccactgcactccagcctgggcaacagagcaagtctccagctcaaaaaagaaaagaaaatgaatgttactatttaatgactagaatagattcataattcagagataaaatattatatatatacacattaaagcataataaaatgtagtgattagccattatttgtaagtgaatttgagtatccataaactttaccttgagtatctactctttattgattacatcctcagcaacaagaaacaaaacaagagcaacccactgcaacyatagwctggctgccagaaggtaagagtatgtgaggatctagtgcaaacaaggtaggaactgttaagagtccatgaatatttcagaagaataatgaaaaagtgtgccagatgggttcacttgcagctggctaacaacatttctgaccaaagcctaatgcttccttacataatttatcatgcacttttcagttcccttccactaccacccctctcttttcattctattattattattattattattattattattattattattattttgagacagggtctggctctgtcacccagtctggagagcagtggcgagatctctgctcactgcaacctccaactcccaggctcaagtgatcctcccacctcagcctccagagtagctgggactacaggtaggcaccacctccctttgctaatttttgtattttttttagagacagggttttgccatgttgcccaggctggtctcacactcctagcctcaagtgatcctcccacctctgcctccctaagtgctagattacaggtgtgagccaccacaaccagcccatgccatactgcaattctaaagatagcagattgtattatttccttcagcggagatggcatcaaaatcctgcacactactattgctttagtatgctctacttaaaaccactgctgaagattatagatcctaacagatttaatcaatgtggcagtcagcctcaagatgaccctcaatgattcttggttcctggtattcacaaccttgccaattcgactactgcatctattaagggattagctgggcacagtggctcatgcctgtaatcccagcactttcagaggccaaggcaggtggctcacttgagaccagcctgggcaacatggcaaaactctgtctccacaaaaaaataaaaaaaccagctaggtgygccggcacacacctgtagtcccaactacttgggagactaggatagaaagatcgcttgagcccaggaggcagaggttgcagtgagctgagatcatctcacaaaaaaacgaaagaaaagaaaggagtaaatctattgagtccttttacactcacgttgagtcctgttaagcaatttatacatcttgcttatgtggatgcctctggtcgcttacacgtagatagtctactcctaaaacagatgcacaaccaacaaaatctgtaattttcatgcataaaaggcccaaagttagtcttgttttcatttagaatgtgatttaggttaacatataataggtttattaatgttccttttaagtatataaatgccctgctctctatcagatttaaaaggtgggctcttttacacatgagaatgattaagtttctctgagactgttctctatagttaaaggggcctggatttggacccagaagaatctctgttgtggttctaattctgccactagcaatgcaaacttaggtaattcatttaacgtctctaaacatgattgccagctgcaaactagggaccatatttgactggctataaaaactaaaaaatagtggcctggcacagaggttcacacctgtaatcccagcactttgggaggctagggcaggtggattgcttgaacccaggagtttgagaccagcctgggcaacatggtaaagycccatctctagaaaaaaaaatataaaaattagctgggcatggtggcatgcacctgtagtcccaactacttgggagactagggtggaaggatcgcttgaacccagaaggtggagatggcagtgagctgagatcacaccactacagtgaagcctgggtgacagaagtgaaactcttgtctcaaaaaaaattaaaaaatataatttgaagccagtcatggtggtgcacacctgtagttccagcaactcaagagactgaggcaggaggattgcttgagcccaggagttcgaggctatagtgtgctgtaatcacatctgtgaatagctactgcattccggccagggaaacatagtgagaacctctctcttaaaaactgtgtgtgtgtgtgtgtgtgtgtgtgtgtgtgtaattcaagcaatacttttattattgttattaaattaagagattaaaaggcaacatggtaaaacagatatatatatattaaaattaggtgcatattctacgataaaacatgtcataggctgggcccagtagctcatgcctataatcccagcactttgggaggcagaggtgggaggatcacttgaggccaggagttcaagacgagcaagggccacatagcaggaccaggtatctacaataattttttaaaaattttttaaagaaaaaatatctaaaggagagttccaggaataccttaaatttcatcatcaaactgcccaaggtttaaaccaattaattatgatgatgaaaatgtggctaatatttattgtgcaattacatcctgccaggctacatagtaagtactatacaagcattatcaaccaatagcaggcagttcaacatcagattcttctatacagctaattggtaaacatttttctatggtagtaccagatgactggaacattagctgggttcggtggagtgtgcctgttctaccagctacttgggaagctaaggcaggagaactgcttgagcctgggaggcggaggttagaacccagtgcaagcacttgcagacattcaaactggtaagctatacaaattccacaatgttaaagaacacacagtttactatcgcatgtatattcctattgcaacaccttatttcaaaataaaaataattttcttttagagagcctatccytatttgttatttaggttgacaaacccaacatacaataaagttgccaaattcattagctgggtgtggtggcacgtgggtgtagtcccagctatttggaaagctgaggtgggaggatcacctgagcccaggagatggaggctgcagtgagctgtgatagcatcactgcactccagcctgtgtgccagagcaagaccttgtctcaaaaaaaaaaaaagaagttgccaaattcaatttacttgtgtgtcctatctttcctatccatcccccatcttctttactcccaccactactattctaattcagaatgttgccttctaatttgtcttacagaacagcctcctcagaggttgcagtgagccaagatcgtgccactgcactccagcctgggcaacagagcaagactctgtctaaaaaaaaaaaaaaaaaaaaaagcatcctaattggtttccccacttcaaatctcgtcccagtttaattccatgctatatcctccatccagagtgatattcctaaggctacagttttgagcaagccactcctttgttcaaaaccttttagggtggtgcatacctgcagtcccagctacttgggaggctgaggtgggagaactgcttgagcccaggagattaaggctgcagtgagctatgatctcaccactgcactccagcctaggcaaacagagcaagattccacctctttaaaaaacaacaacaacaaaacacctttcagtggctcttttctatttttagggggttgttttgttttgtagagacagggtcttgctttgttgaccaggctagtcatgaactcctgggctcaagccaagccatcctcccacctcggccttccaaagtacgggattacagatgtgagccaccacaactggcctcttttctgtccttcagagggccatctttatagtctagcattcaacaagtagagaatacaggttgagcatccctaatccagaaatatgaaatgctccaaaatctgaaattttttgactgctaatgacaccacaagtggaaaattccatacctgaactaatgtgatgggtacacaaaatcatttaaaatactgtataaaattaccttcaggctacatgaataaggtacatatgaaatataagtgaatttcatgtttagacttaggtcccacccttaagaaatctcattatgtatatgcaaatattccaaaatctgaaaaaacacaaaatcctaaatacttttggtctcaaatattttggataagggatactcaacctgtattgggaatgtttcccagcagccacttccctccctcttctactgtgaactagctatatagttttcatcccaaattagtctcagtaatcagtttaatcccattttacttgccacactgatttgttaaaggacaggccacagcaaacacccatatttttgtttcctgacaggagtgaaggctagaggaggaaagttaaatctcttctaaggaaggtgtgatgtgcgaatacaaactcttaacttctgctgccacttaataactctgagggaagccaccwgaagagaagtcaacagtgcataaaggttgcgcctaaacagctgcagtgaaatgaagctggagccacgttcaaattacaccctgaacacatgcccccaaaaactccttttaaattttgtgaaccagccaaattcctttatctcctctttgacctataaaccacagcattctaactgatagagaactccaaaggctgattcaacctcttttcccaagtcatctcccaccacttcataaaatgttgaagtgggctaatctatattcctctttgtttttgagacaagggtctggtatgttgctcagactggtcttgaactcctgggctcaagcaatcctcccaccttagcctcccaggtagctagggttacaggtacatacatgccaccacacccagcaacatacctttttttttttttttttttttttgagacgagggtcttactgtgtcacccaggctggagtacagtggtgaaatctaggctcaatgaaatctccaccttccaggctcmggtggtcctcccacctcagcctaccgagtagctgggaccacaggcgcatactgccaacacccagctaattttctgtatttttggtagagatggagtttcaccatgctgcgcaggctggtctcgaactcctgagctcaagcaattcacctgcctcccaaagttctgggattacaggtatgagccaccacgcctggcctacatacctcttttatgtgtgtaacatatatatctggctctggaaacaaaaagtaggagcagtgagctgggcataaatagaccttcttttccacaatttgcccccttacattattttgtgactgtgttatattctcctcccaaaaattttaaagagccaatgccagctgggagcgatggctcatgcctataatcccagtgctttgggagccagaggcaggcagatcacttgaggccaggagttcaagaccagcctggccaatgtggtgaaccctgtctctattaaaaacacacaaaaaaattagccgagtatggtggtacatgcctgtgattccagctactcaagaagctgaggcagtaggatagcttgagcccaggaggcagaggttgcagtgagccatgattgtgtcactgcattccarcctgggcaacagagtgagactctgtctcaaaaaataacagttaagagccactgccagtcacagtacacagtacttaggaacaactaaaattcatctcaattcaactcattctaaaaaattaccaaaaaatggcctggtgcggtggctcatgcctgtaatcccaacactttgggaggctgaggcaggcagatcaaaaggtcaggagatcgagaccatcctggctaacacgatgaaaccccatctctactaaaaatacaaaaaattagctgggcatggtggcgggtgcctgtaatcccagctactcaggaggctgaggcaggagaatcactggaacccgggaggtggaggttgcagtgagccaagatcgccaacactgcactccagcctgggtgacacagcaatactccatctcaaaaacaaacaaacaaaaaaaccaagagaaaaaaattataagcaatatatctccagataagaactaatcaaaattctctctctttttttttttttttaagagacggagtctcactctgttgcccaggctggagtgcagtggcacgactttggctcactacaagctccgcctcctgggttcacccaccattctcctgcctcagcctcccgagtggctgagactacaggcgcccgccaccacacccggctaatttttgtatttttagtagagacagggttttaccatgttagccaggatggtctcgatctcctgacctcgtgatccacccgcctcggcctcccaaagtgctgggattacaggcgtgagccactgcacccagccaaaattctctttaaaaaaaaaaaaaaagttttctttttttaggagtttggtttcatttactcaaaaagattttagtaattttttttggcactgtcattattaacaaaaatcatattcattttcagtaaattgataggtttaaagaaaatgagaaatgcacatctgtccttgcagaagttttcccaattactgtgtaactgtcccttcttaggttataccttcttaggttatctcaaggtctttggttggttgattggtctaaacatttgaaaytcacaggtaggttttggcaggaaactcatttacagaaagggtgagaaatgttacctcccttacagcaacacaaactggraattttaaaagcaacaaaagccaaaacataataagacaatcaaaagattgtccctgttatcattctgctgcatgaaaagggaaactgcaagcattctccgcattctcggctgcaagtrccagcactgatcatgaaatgtttacatagcccttactatgggagacaggaaaggagctgtgaaggacaagtgtcagatctgctgctgctgcttcaagactcagcctccctgaaacatcactctttcttagcaacctgcagggagacamccagatttttccatcagaggtttcttataccgtctaaacatattttcattctacgtgacaacacacaaatcggaccagtaagatagagatcaagagtttatcttgtcactgagttgcctcttctgctaactagcttcttcctgtcttcccatcttatttgtcactagtgttttcccctttccatagaaaaaaaaattttaatagattattttagcattaagcaactgagtgagattcaaagctactctttcttttctcatttcactttaattactaattgtagaaaggatttgggtttaaaaaaaaaaagttgcaagaactacggatttaatttctatctctcaaaagtaaacacctgaattagaaaactccattttatccattcactctttcttttttagaaaaataatttaaaagccacaatttttttttttgtttttttgagacggagtttcactcattgcccaggctggagtgccatggcacgttctcggctcactgcaacctccacctctcgggctcaagcgattctcctgcctcaacctcctgagtagctggggagccaccacgcccggctaatttttgtgtatttttagtagagacagggtttcaccatgttggccaggctggtctcaaactcctgacctcaggtgatctgcccgctttgacctcttaaagtgctgggattacaggcgagagccaccgtacccagccaaaagctacaattttttaaaagcacatattgccaggccaggtgcagtggctcatgcctgctatctcagcactttgggaggccagcgcaggtggatcatgtgaggacgggagctcaagaccgcctgtccaacttggaaaacccccttccttcctattaatatcatattatccaggggtggtggccaatgcttaatttacaatnnnnnnnnnnnnnnnnnnnnnnnnnnnnnnnnnnnnnnnnnnnnnnnnnnnnnnnnnnnnnnnnnnnnnnnnnnnnnnnnnnnnnnnnnnnnnnnnnnnnnnnnnnnnnnnnnnnnnnnnnnnnnnnnnnnnnnnnnnnnnnnnnnnnnnnnnnnnnnnnnnnnnnnnnnnnnnnnnnnnnnnnnnnnnnnnnnnnnnnnnnnnnnnnnnnnnnnnnnnnnnnnnnnnnnnnnnnnnnnnnnnnnnnnnnnnnnnnnnnnnnnnnnnnnnnnnnnnnnnnnnnnnnnnnnnnnnnnnnnnnnnnnnnnnnnnnnnnnnnnnnnnnnnnnnnnnnnnnnnnnnnnnnnnnnnnnnnnnnnnnnnnnnnnnnnnnnnnnnnnnnnnnnnnnnnnnnnnnnnnnnnnnnnnnnnnnnnnnnnnnnnnnnnnnnnnnnnnnnnnnnnnnnnnnnnttactctttctcaaaaaaaaaaaaaaaactcacgagttattaacacatagccaatgaaatcagtctccttttctctgtccttgtttctcttcctactctattttaggcatctgaaaaagtatctaaaaggtgttatctaaaaagtgcttattataagaaggttaaagcactgattctctctgaaaaaaatctcctgctcttgtatgacaccctctaattctggattttaacttctcatacctagagacaacaaatagggaataaacagttgaatctctcttggatttccttatcctagaaagctctaattgttagcctctcccgaaatataccattttagaaaacataattaaatagatttgggggacaggaaagcattaaggaagaaaaagactttttaaagaaaaaatatttacgaaactcatgccaattaaatctgaatgttctctttaattctaagagcatcttttaaaggaccttaaagctttatatgttgctgtgtaaggaaacctgagcagactggagaaaagctcaaaggcctatctataatctcatcacaaagtgacagggtcaaaaggcagaggtcagggaacagggtacaaaatagttcccacacttgaaagaaaactgtatctcattagttcagagatattaaaaaatattcaattgtgttactaaaatgacaatttatactttaaatcccaaggcaaatttgaatattatgaaataatatacttttaagagcaaaaaatgtaagmagttacctcttctacatttgaaaaaaacaccaatctctcgctcacacatataccagtgcttcaactgtccctcaaagactgatgttcagataaaagctgtcacctgacctattcaatagagttcaataaggcactgaaataaatactgaatgtgcatacatgtcaacagacatttcatatctgggcctctgccccataatgattcaacaaggtatgtctacttcatggccttatgttcacattcagaaaaagctaaatttttactcttgcttagagrtttcattccagggaaaagtgaatgtaatttcgttcaatattcattaagtaggctcaacacttgtgcaagagactcttataatgactccatgattcttcaatggacaattaaatctacagaagctctggggtctagggcatttgctggctatccctctaccacttctaytctaaccacaaattttgtgttctaagtggcagagarggtgatagaggtatcaaagagataaagagaattctggccaggcaccgtggtgcacgccattagtcccagctatcccaggaggctgaggcaggaagatcccttgagcccaggaggttgaggctgtagtgagctatgatggcctgttaatagccactgtgctccaytctgggcaacaaagggagactctttatctcttaaaaaaaaaaaaaaaggcacagtggctcatgcctgaaatcccaacagtgggaggccaaggtggaagaaccatttgaggcaaggaccatttgagactagcctggacaacacggtgagatcttgtctctacaaaaataaaaaaaaaaattagccaggtgtggtggcatgtgcctgtggtcccagctactcggaaggctgaggcaagagaaccacttgagcccgggagatcgaggctgcagtgagctgtgatcgcgccactgcactccagcatgggtgagagaatgagaccctgtctctaaaaaataataataataataataataataataatttaaaagggaggtggccaggcgcggtggctccctgtaatcccagcactttgggaggccaaggcgggtggagctcttgaagtctggagttcgagaccaacctgggcaacacagcaaaaccctgtctctactaaaaatacaaaagttagctgggcatgctggtgcatgcctgtagtcccagctactcgagaggctgaggcagaagaatcgcttgaacctgggaggcggaggttgcagtgagctgagattgcgtcaccgcactccagcctgggtgacagagcgagactctgcctcaaaataaaaaataaaataataaaagggaggtggagggggaattttggaatcaccagtatggttcttaagtttttgttttctaccaacttctatcctctccatacactcaatactttaattatttccccattggcyccatccaccagaaacaagatgatttacaagtggttcactgtaaacgggtcctgtcagtccttcactatgaagaatatacaagattttacattctagtacacacagctttcacatatttaattaaaatcagattgtagctagagctgccagtgaaaaaatgaagcactgccagacaggagtgagaatgaccaaacaaaataacctattttcacatagtcacctcaagggtaccaatgcctgtgttttaactgtgaaatcacagtcattgttctggtgaacaatggcacaaaacaagttaagtccagtgtgaaagttcattttcctcgagctgagcaagaatattttgaaatcctgacaaaagtttatttattaagaaaatacatacacttgagacaggagataggaaatagttttaaacaatctgttatcttgttaccccagccatttatatttccttaaaagttagagttgaagttgaggataacttaacctaaaaatagaaaacactgtggttctaaaagtaaatcacctacaagctttaaacctataaccagccataaattcctactgctcaatgtattcttattaaagttagtatgtcattctcatagaattccaattgataatgttggtgctgattcttgtaacaaaggaggactacatcagggaattacgtaagagtagattgtgactacccacttcccccttcaaaagcaagtcacatctctgcccaaaggaaacaattcctttttgctgttttagtcctgatctacagcaataaaaaattgatataaatttaatatctagaaagaatatccttagactagcagattgtccctgttttctcaaaggaccacaagagaaggaagaggaagaaaactgaacagatactggaaataaaaggtactaaacccgaaaagatgtgagatataagaaattgcccagtttcaggctggatgtggtggctcacacctgtaattccagcactttgggaggcccaggcaggatagcttgagtccaggagttcgagacagcctgggcaacacagtgtgaccccatgtctacaaaaaaatttaaaaattaaccaggcacatagcagggcacggtggtacatgcctgtaatatcagctacttgggaggctgaggcatgagaattacttgaacacgggaggcggaggttgcagtgagccaagatcacgccactgcactccagcctgggagacagagcaagactgtctcaaaaaacagaaagaaagaaagaaaaaagttaaccaggcatggtggcacatgcctgtagtcccagctactcaagaggctgaagtggaaggactgcttgagccwgggaggttgaggttacagtgagctatgactgtgccactgcactccagcccgtgtgacagagcaaggctctgtctccaaaaaaaaaaaaaaaaaraagaagaatgaggccgcgcgcacaggggctcacacctgtaatcccagcattttaagaggccaaggtgagtggatcatttgaggtcaggagttccagaccagtctggccaacatggtgaaactctgtctctactaaaaaatacaaaaattagccaagcgtagtggcagacgcctgtaatcccagctaatcgggaggctgaggcatcagaatcgcttgaacccgggagacagagtgtgttgcagtgagcygtgatcatgccactgcactccagcctgggagacagagcaacacaccatctcaaaaaaaagtaataataatgaaagataagaaagagmcagagaaaagagagaaagaaaagaaaaaagaaaaaaagaaatttcccagtttctgctagaaatgaaggtaaatggaagattcagacagacatttccaagagttttttcaggtcaggcgtggtggctcacacctataatyccagcacttttgtaggatgaggagggaggattacttgaagtcaggagttcgagaccagcttgagcaataaagcaagaacccatctctacaaaaaaaaaatgttttttttaattagctggtcatggtggcgcacagccgtggtctcagcttctcaggaggttgaggcaggaggatcacttgagcccaggagtttgggagatcaagcctgcagtgagctatgatcacaccactgcactccagcctgggcagcagagtgagaccttatttctaaaaaaaaaaagagcgagctttttcactatgaggttttacataatgatacaagaacttttttgtcaaaagaatatttcttcttctacaggtttttctcaaaaagggacaaccaaaagagcaataagaggtggcatcatgaggaccaaggtgaaaataagggtgatctttgaagaagggattagagaaaaaaagtacaaaagcctggtctatgagcaatcttgtgtcaagctgtactgaggaattaagatgatcagaaatttacttaatttacattatcacttctacattgatgttttctcaaactataggataatttcctgtttaaataaatgacagagtatgttgtactagaaaagaggaagagaagggaggggcaagaaaatatagtctacaaagcagaaacctggattctccaggcatggacaggaaaaaattaagcaaaattaagtggattttcatcagaaggtctctgggaatctataaaaatagatttaaacttaaaaatatttaaacttaaaaatatctttaggccgggcacggtggctcacgcctgtaatcccagcactttgggaggccgaggcaggcagatcacgaggtcaggagatcgagaccttcctggctaacatggtgaaaccccgtctctactaaaaaatacaaaaaattagccaggcgtggtggcgggcgcctgtagtcccagctactcaggaggctgagacaggagaacggcgtgaacctgggaggcagagcttgcagtgagctgagattgcgccactgtactccagcctgggcgacagaamgagactctgtctcaaaaaaaaaaaaaaaaaaaaaaaaaatctttaaactgggtttcacagtttaaaatctagaggtccacaaactatatttaargattcagcacttcagtcttcacagcagaactgaatgaaaaaattctacagggtccagtgcagtggctcacgcctgtaaacctaagcactttaggaggcygaggcagactgatagcttgagctctggagttcgagaccagcttcggcaacatagtgaaaccccatctctacaaaaaatacaaaaattagccaggcgtggtagcacacacacctatagtcccagctatttgggggactgaggcaggagtactgcgtaagcccagaaagtggagactgaagtgagccaagatcatgccactgcactccagcctgggggacaaagtggkacgctgtctcaaaaaaaaaaaaaaaaaaaaaaaactacaaccctaacattattaactccatcacatttttgtttgttcgtctttagctcagatcaccttttggatcattttttattgtaatttataaatactctttccaaaacactgtcacattgtataattgagaaaagtatctagaaacaatccagatcagcaaaagtgttgagacacacactcccatgggtgtcctcagataatgcacaaaatagttttctagaggaaagtaaagcaaacagactgactacttctgcagtgatattcctaaaaggctttattaatatgtggaaactattcatagctcatcagtaacggtagcttaccagtagcataaaatagatttcccattatgtatggggctatgcacaattactggtttgatgcatataatgccacctttctctcccacccagtaaaagcatacaggaatggaactgaataaaaataatatcattagagggaagaccttgaatccattccacttattttaaaatatatatcataacctcagtatgtctactactgttaataattacttgtgacctagctcatgaacagtaggcccattaatgtgtcaccacccagcagttgaggacagctggtctgaaggactcagaggggcagcagggcgtaggaaaaaaggctagtttgcagccagacagcctgggatggaatccaagctatggcctttcctgtctttgggcaactcactgaatgtcatccttctcatctatcaaatgagaaaagtcatattttcaagttattgtgagaattagcgtttataaatcaccaaccacagttcatgcctcataaatgttagctattttcatagcatcatagaataagggtgacttcctgggattacttctgacttaataatgctagcacatatctttgaaagtcatttaaataaagcattatttcaaaattagctttctgcatgagtgatatacacaagtttctaacagaaaaataaaaggtaacccaagaaacccatgttagtaaaaatagttacaagagttaatttcaaataaagttagtaaagtcatagattcttggaaaaggtgcagaacatctgagaaagctaatcttgcggcctcttctatcctcaggatgtgctgtctcagcagcagataaaatactaatactttcattcctagaattctgagttcttacctcctcacactcaaccagtcatcgctgcattttgtttgaaaagtaatggaggccaggcgcagtggctcatgcctgtaatcccagcactttgggtagccgaggggggtgatcacctgaagccaggagtttgaagccagcctggccaacaagctgaaaccccttctctactaaaaatacaaaaatgagccaggcttggtggcgagtgcctgtagtcccagctacttgggaggctgaggcaggagaatcacttgaacccaggaggcagatactgcaatgaggcgagattgcgccactgcactctagcctgggtttatttatttatttatttatttttttgagacacagcgagattctgagaaagaaaaggagaaagagagaaagagtgagagaaagagggaaggggaggggaggggagggaagggagagagggaggaagggagkaagkaaggaaggagggagggagggagggaggagagaagagagaagagagaagagtaatggggaaagacagtcccatatcaaaaatttttggaatctctggccaagaggaccttacatggtgccatcttaaaaagtcaagccttaggtagaacagtgcattgtaaagcacaataggagagtataaacagaaaaaaatatatataaaaaaatatatatataggattaaactttattgaaacaaagagaactgtactgactgactgtgcccaaagctgatgtaggtgccatgaagaacaaatctgtaaatgcagtttcctaagatattcctttaaaaccacaactgaagctacaagtgctctttagtacaaccactttctgaaatttcataaatactgcccatcatttacatgctcatcacttggcactagyttataaataaataagacatgtttgcttaaaaaaaaatcaaagccttgttggtacctgcatgcttgcttgcatatacctggtaaaaatggttaattttatttaccgtatcttatttgaagaggaaaggaataggctaatacattttatagttgaaagaaattttattagcccttcacaaagctgttagatacctttttttagaaatcatttatccattatcttgctttttcatcaatctcaagcttctcatttttaagaaaactctagcttccattttactgtttttatttattttattttatttttaatttttgagacagggtctcactctgttaaccaggctggagtgcagcagcgcaatctcagctcactgcaaccttgacatcctgggttcaagcgattctcgtgcctcagcctcccgagtagctgggattacaggcaaacaccaccacgcccagctaatttttgtatttctagtasagacagagttccgccatgttggtgagcatgctcacaaactcctgacttcaagtgatccacccgtctcggccacccaaagtgctgggattatagggctaagccaccgcgcctggtccattttagagtttttaaaatccacacataggccaggcatagtggctcacccctgtaatcccagcactttgagaggccaagatgggcggatcccttgagcccaggagttcaagaccaccctgggcaacacagaccccatctctacaaaaaaaatttttttaatcagtcaggcatagtggtgcacacctacagtccaagctacttgggaggctgaggtaggaggatcacttgagcctaggaggttgaggctgcagtgagctgtgattgaagtattgcactccagcctggacaacagagcaagaccctgtctcactcttgttataaataaacaaataaatgtaatatttatttgttataaacaaatacctaaaagtttgaatcttattctaaatacaaaggaagttattagagaattttaagtagaaaaaaattattctaagatctcaatgactatatttgggaactggcagtatcatccatactacagtaataatctagagattagtacagtaatttcaaacaggaacccctgggtccttaaaagtccatgtagataataattgggagtccattaattgacattaagatttcaaaatgcttcttaaaaattgtagctttcggccaggcacagtggcctgtaatccyagcactttgggaggccgaggcgggcagatcacctgaggtcgggagcccgagaccagcctgaccaacatggtgaaactccgtctctactaaaaatacaaaaaaaaattagagggacatggtggcacatgcctgtaatcccagctattcgggaagctgaggcaggtgaatcgcttgaacctgggaggcgctggctgcggtgagccgagatcacaccattgccctccagcctgggcaacaacagggaaactctgtctcaaaaaaaaaaaaaaaaaaagtagcttttctggaaagggaactgtataaactaattgaktttctccctttcctggtggctgattttctaattacttaatcgctcctcatgtggtatagttatccctcagtatctgtgtgggattggttccaagactcccaggatgctcaagccccttacataaaatcgtgtagtacgtacagataacatacgcacattctcccgtacactttaagtcacctcctggttagttataatactcagtacgatgcaaattccatgtaaatggttgttatgctgtattgtttagggaacaatagcgagaacaaaaaacacgtacatgcaaccacaatttttggtttttattttttttggaacactgtattttcaatttgatgatggtttaatccacagatgtggaacccacacacatggagggctgactatacatgtggtgtgtactcgtcctcttgttctatgacatttaggattaatttttttttaacagataaacttagtttttttactcaaaaacaatttcaggccccaagggtggtagttagaaatcattcatctcatttaacccttttcaagacagacgagaacactgatgcctgcggctgtcataagtgacaggccaggaatggaatctcagcttctgactgtgcattcagctctaactgctgtactcactgccctgccagctatggtttcacaagcattcatacattcctttaaaaaactataaactcacctaatgacaaattatttatgctaagaaatgataaaacccagtaagaagagcaaagaggttttttaaaaagttaaaagtggtatatttcatagtaaaagcctttatacagtaacaccttatctttaaaaatattcattgacaaaagcaaaaatatcattaaatatataatcttctaaatctaaatctgtgatgaatgaatgaggaaatgcatgcaagagaaattactagtgctgaccaaagaagaaacaagctaggtcaggtcataaaggcctgcccgatagtgtcgcctttaatatctttcccatatagaggaataagaagataatttcacttgacgataaggttacccatttgggatctatattctggtagattttacaatctgtatgatacagcatatgttactagggagacagcaaatatagtggttatgggtatggatgttatgggtatggatgaattatgtcagacagatcttcaatccaggcttcttacttattataggaactgaagtaaagtattcattctctagactcagtttcctcctgtgtacaaaagagaaaacaggccaggcgtggtggctcacgcctgtaatcccagcactttgggaggccaaggtgggtggatcacaaggtcaggagttttagataagcgtgatcaacatggtgaaaccccatctctactaaaaatacaaaaagtagccaggtgtggtggcgtgtgcctgtaatcccagctactcaggaggctgaggcaggagaatcgcttgaacccgggaggcggagattgcagtgaggagagatagcgccactgcgctccagcctgggcgacagagtgagactcagtcttttaaaaaaaaaaaaaaaagagagagagagagaaaagaatgcctatttcctaaggttgttgtccagactgaatgaggtactgactataaagaatttagcacagtggttgggtggggtggctcacaactgtaatcctagcactttgggaggccgaggcaggaggatcacctgaggtcaggagttcaagaccagcctggccaacatgatgaaactccgtctctaccaaaaaatacaaaaattagccaggcatggtggcacgcacctgtagtcccagctacttgggaggctgaggcacgagaatcacttaaacctgggaggcagaggttgcagtgagccgagatcacgctactgcactccagcccgggcaacagagcaagactgtgtctgggaaaaaacaaaaacaaaaacaaaaacaaacaacaacaacaacamgaatttagcacagtgtctggcatgtggaaagcactctataaatgttagctattttactatttcatcayagattcttataggacagtggccaccrcttacgtatgtactccagaatctgacacactgtaagcatttaacattaaataatccaaaatataatagctagttatggttttaccaaaaacaaaatttaggtcattattaaacaaaaatgctaaggatcaggcatatggcacgtttcctaaagcatcctgtatagaaccatctctaccattcagtaaattatagaagaggaaattgttttcttccgtatgaagctttatggaaatcatgactaacaatgcattgtattctagatatttacttttattactctgagagtatctgtgaccaacagtggaaatacaagcaaaaggatgtgcacaggaattttagracagtctgtcttaacaccttagcagcaaacagaacttgtactcctccagcctcctttctctctccctgtccccttttctttccctttctctcctccctcaaagacactatgtctcaccctcttcccctcccttgtcttcccagttgtctatgctggtgtgtcctgtattaacaaaatgggccataagcctgagccttggggttatcacagagaatttagcttcactcactcttgggccaatttcactataaagagttttatttccagtagatttccaaaattaaatgatcattataccacagtgtcttagtctgttttcgtgttgctataaagaaaatacctgaggctgggtagtctataaagaaatggcgcagccaggcatggtggctcactgcctgtaatcccagcactttgggaggccaaggatgggtggactgcttgagctcagkagtttgagatcagcttaggcaacatctttgtagagatggcaaaaccccatctctacaaaaaatacaaaaattagccaggcatggtggcacatgcctgtggtctcagctactagggagactgaggtgaaggactgcttgagcccaaggagattgaggctgcaataagccaacattgcaccactgcactccagcctgggtaacagagactctgtcccacaccccccacccaccctccccgaaaaaaaagaaagaaaaagaaaagaaatagttggcggctatactacgcaagaggcatggcgccagcatctacttctggtgagagcttcaggctgcttcctctcatggcagaaggctagccaattagagatcacatagcaagagagaggaacgaagagggtaggggagtggtgccagactctttttaacaactagctcttgtgggaactcataragggagaactcacccattacctctaggagggcaccaagccattaacgagggatctgcccccataacccaaatatctcccaataagccccacctccaacattaggaatcaaatttcaacatgaggtttggggacaaagagccaaactagcacacagcaaccagatcttgaatcttctttggcctcattaaaatgaaggctgatccctgtactactccttccccagcccctgagctacccggggcagaccttccaaactcccaagaacctattgtgagccaaggatgtcaacaaagctaacaattgacacagtatcaatggtatttggatcacggcagcttctatcccaattaagcctatacacccggccactgtttttaaaaaacacacttcagcacagtcttgactatgacattcagtctggaataagggcaatcctgaaatgcttgttgaatgagtcaagctcatcttttttctgagtttaaatagaataactatggagcatagtggactggaaccaccaggcactagtcaggtgtctactgctgatcaaatgtaatctgagagggcccttaatctctgagcctcagtctctttaccataaatatgtctaaggtcccttcaakaactaacgtgacatgatattctgtcagtcttgactaaatgttctgcttatttgaattcagatcatggtctccaccgtctctacgctcttttgaaaaccacacccaacacaaccaaagctaaaaatagctagagagagacactaaggaaaagatctaaacaaagttctatggcagagatctcatccatcagacttcgacaactattaggagggctgaatccaggctaccaagggaacactttaagaatattctggtcatcacataatttgtagactcatgtaaacttatattcattcccttattaaacactgtgtactgtatataaggtactacgaaagaggcaaagtcccttctctcttagagggcttgtatatttattttacttaatcaaggccttatcatgtccttcattttcccattgctcaaaagattgactgctgtaaattaagccatgtgtactcctacagccaggtcttaaaggaaataaaagctataaaataagatttcaaaatgatgtctgccttccctgacatcaactaattgcatgatttacctccatttatacctcctttcttctacatgcaataaagaatctcgttttgaaaccttttccttatctttaatatttaaagggaatttaaacatttctcccaaaggacgttttgttcatgggcaaagtacctcttgaaaatatacagtgggtaggagaagcacaagaacttcgatgtggtacagaaaggacgacaggtaatatgagtatatcagtatatacatgtggacatcaccataaagtttctaagtcctccattttaaaatatatttttatgtatatagttaaattattttcagctattaagagttctacgtatttgagatgaaagaagtctcttccattgctgtttaagcttggttttactaggagggtctaaaaaccatttgaagccttgataagttttattataaggtcttagtctatttaactgttgttgtctttgatttcaatgtcccaccacctgcagagtgtgaattctaggaatatgcgtatgttaagaaagtctatgaagcaactggtagaatttatgtttaatagaagtcaattaagaccttctagaggcacggtgacaacttgctaagaaagtgtgataaagacagatcagctccagcaaggcaaaatagaaacttgactatcattaactttgaaattaatgcagcaaaacagaaactaccttctggctaatttgcctaacacagtttcatgatccccaaatgttgctctacrgaaatagtcaagaaaattcttagttgagaacatgatatgacattctcctgttttcctgccatgtcactatccacactccttaatctcctcggttgcctcctcctcctcatcctccccacctatgcatgctagaatggccccagggctcaatcatttgcgtgtcctcctctcttttctatctatactcaacccttaagtaatttcatggctttaaatttatacctacagtccagatcttcccccaagagatgtcttgtctatgtgacatctccatttgaatgtctaatggacacatcaaacttaatacatccaaaactgaactgatttccagtctgattctccatcagtcttcctatttcaggagagaagtttataattgttcagccccaaaatcttggagtcatctttgatcacttctttgaatatgactaccatattcatagaattcatacatattcatataaatcatcagcaaatctcgttgggcctaccttcaacatctatctagaatctgagtccttcctgctgsttcaccaagccaacaacttctctcaccacaaatacctttttttttttttttttttttttttttttgagacagagtctccctctgttgcccaggctggagtgcagtgrcacgatctcagctcactgcaacctccacctcctgggttcaagcgattctcctgcctcagcctccagagtaactgggatattacaggcatgtgccaccacgcccagctttttgtattttcaggtgagatgtggtttcaccatattggccaggctggtcttgaactcctgacctcaagtgatccacctgcctcggccttccaaagtgctaggattataggcgtgagccacagcatccagcctctcacctcaaatactgaaagagctccctaactggtctcytgcctctacccctgccctratatagtctacccaacatggcagccacaacagtcattttagaaggcacatcagatcttgtcattactctgctcaaaaccttccaatactttcccatctcagagttaaaagcctaaaaactgcatgaggccctatacaatctcccctgccctttctctttgatcttacctactactctccctctccctcagctccagccatactggactccttgctgttaccagcacaaactagkgactgtcccactcagggtcttcgcacttgctgtttcttctgcgtgcaatgctgtgcccccaggtgatccatctggcctgcttcctcatgtccttcaaggctctgttcaaatgtcaccctccctgtgaggccttccctaaccatcttatttaaaatcacaaccccaccatcccaccactctgctggcatgtccctaaatccactcccctgctttatttttcctcatagcacttattaacatctggagaactatatacagtcggcacttcacgtggactccgcatccacagattcaaccaagcacagattgaaaatgtagttaggcctacaatggttgcatctgtactgaacatgtacagacttcttttcttgtcattattccctaaacaatacagtataacaactatttacataacattacaacgtaacaggtattgtaagtaatctagagatgacaaagtgtacaggaaaatgttcataggttatatacaaatgctacaacattttattataagagacttcagcatccgaggattttggtgtgggggacactctagaatccatcccccatggttayggagagatgattgtattttcattatctctttacactngaacgtatgctccatgatggcagggatttctgactgctttcttcacagctgtccccagtgcctaaaaaaccgactacagatagatgctttcaaaactgttggatgaatgatactgaaatattacaaggcaaaatacattattacctgaatacattaaatattatgagaagcagaaatcccaatcacccacactcacacagttttgcaaaaagagacatcatagtttgtttcttaaaaatgcattaaagtctaattgatggttttgttaacatcattctctctgtgcctaaagagtcctaggtcacacctaaaaggtacagttttagcttcagtaggcaaacggaaaagaaaaatacaggcttttttcctttcattagtcatcactgacagaaggcctccaagtgaccctggtgccacaaatgtttaggatctttagggaagaaaggagtctagaaaaataacaatattccttcaccaatctcgagaagaatctctccaaatctctctgcagacattttttcttcatatcctttaacaaagccattcttaacatgtacatgaaatcttagttgaagaaacaatgtgattacataattacacatacggaaaaacttggtattctattatctctccaaatttttttttaactaaaactagacttacagtttttgttgaaaatgttttgtgtttctacctccgaagaatatgaaaaaaagaaaatgttttgctctgaagctgagttaagaagaagatagccaagacgtgggttgatggggrctgtattttaaggctgaacagttttgtttactattgtttattatttaatatattcttcccagtctccccacccccaccaaaggaaaagcgaaaaatttacgttagtgcaatcaataaggaattatttgtccaaaggaagttgttctgaaaggctatgacctaagtctttaacacaaagttcaggcggtagatgtcacttctctcacccatttaacaacaacaacaaatcaagattcagatcccgcggaggcaagcagaaaggaacaggcgtgaaaaatgaaatcagttgtttctccccggcctcctctcgacactgcgcactccgctgccctgcccccgcccatcgccctttagcggccccttttaacggcgtcgtttgcccagcacagccccgcactgcgccatcaaatgagtcaagcggaaggaccggtacccctccgggaaaaccaggcactaacacacggtgcacccaactgaatttaaactcgggaacagtgtaggcagtgtcaacaaagcgcggtgctgggtcccgagcgtccaaaggtccctgccagctcccagacgcggccaaatccacaggattccaaaaggtgacttggccggcaccgcagagcggcaggcggcgcagagggcagagtccgaccggtccccgccccgcgctcgctccgcacggccaccggctcctccgcggacgctaccccggcgggagccgagctgagtccgactccccstctcccgaagaggcccgaaagccgcgtcacgtgcggggccgaaacttcgcggccggggccgggtggctggcgggtgggaggcaggcacggcggtcggggggcagccygcgcgcccggtgactcaccggccgcctccgagtgcggctgcargcgaaggggccggcgcgccaggcggggtccgtgcccttggggccacccccgcgcctgttattaataacccagcgcctggaggcgaaagccccggtgggcgcagccgcaaagcccgcacgcggaataaataacaatgtcattaaatcgcgcccgagcgccagttcggccagaaagcggcgggagggcgccaccgggagctgactttgtctggagcctgcaccccgcctcccgcgcgtccccacagcgtcccccgcgcccctgagggggctcagcgccgccgcagccctggccttacccgccagctcgtcaggctccagcccgctgtccgcgtcgatcccgcacagcacgaagtagtgcgcgaagcggcaggcggccggggaggagcccgagcccgggccgggcgccgcgcagctcccgctcatcccggccgcgctgctccaggggccgccgccgccgccgcccgggaaggctttctgcggaggctgccaccaccgctccggctgtggtctgtgcgcccgccctagggcgacactggcgcgcccatggccgcgcagccgcctctcgccgccgcagcctgcctcctcgctcggcgcgggggaagcggccgcgggctcgcgcgcggcgggtccggagcccggccgggtgggggaggggcgcggggggagtgtcggcctgagaggccctcgcagccgcagctgcgctcgcgagctgagagccgccgcgtctggcgcccgcgggtcagctgagcggcgctcgggctgtgggagcgcggggcgggcgggggcgccggggctcggcgcgtgcgacggagaggggtggggggcgcgctcgcgagggacggaggcgcgcgcttctaccgtgcgcgcgcgcctagcgggttcggaggccaagcctggcgtggggccgcattcgtgcccactggccccggctgcggcatcgagggcgaccctgcacacacccctcctcgccctggccagccgataagagggctagcctcagtgtgggggtctgtcttctaaaggggttgtcacccatccttatttcttttaatgcagctttggggaaggtgaacagccgctctgagatcatttcgcataacggtctgaaccatcgtcttttaaactgtgacctgtgtgggggtgcctgtctcactttaaggtcctcccttcccccagccgtcaccccatttacaggccatccttagtgacttagtgacaagtcaaccgtgagggggaaaaaacacaactcaatacccacaaagcgttgagacttctagaaggagtgcagtcaccaacccccgccttctgtcatttatcctgacattttccaggtcagtgtaaatagccaaggcgctccagttccgcagccctgtacccatccgatgttatcggctctccccgcaagtaacaatcggaggctaaagcaacaggaattagaccatgaactctgctcctcccaaaggcacggctttcttgccctgctcagctgtcttttgccttctcggaaggaactcgacaaccagttctttttcctttgaaagaaaactggctgggctcagtggctcacacctgtaatttactcaacactttgggaagcccaggtaggaagatcacatgagaccaggagttcaagaccagcctgggcaatagagggagactctgtctccatctaagtaaaaaaataacatttatttatttaaaaaataattttttaagagacagggtctcactgtattgaccaggctgctctcaaactcctgggttcaagtgatcctcccrccttggcccccaaatgtgctaggattacaggcataataagccactgtgcccggccatgtaagtaaaaataaaacttaaaagatagaaaactgaatgcaattcatctccacatggcaaccccttccacaccactccctgctttcttctttggggatttggggcatctaccactagacatacaagcaaaccttccagagaggttgcctgagagaacctcgattatttgactgaataatgttcttcctagaagatacatgtgcgtgcataccatcatttaatgtagcttgtatcttcactttctttcttcaattttgaaatgaaagaggctggccatggtggctcaggcctgtaatcccagcactttgagaggccaaggcaggaggagcatttgagtccaggaattcaagaccaacctgggcaaaatagtgagagaccctgtctctataaaaataaaatgaggccgggtgcagtggctcaagcctgtmatcccagtcctttcggaggccaaggcgagaggctcacttgaggtcaggagtttgagacaagcctggccaacatggtgaaactccgtctctactaaaaaaaaaaaaaaaaaaaaaaaaaatcaataaaataataattagtaaaatataagaagaattggccgggtgcagtggctcatgtctgtaatcccagcactttgggaggccaaggcgggcggatcacgaggtcaggagaccgagaccatcttggccaacatggtgaagccctgtctctactaaaaatacaaaaaattagccagtgtggtggcacgcacgtgtggtcccagctactcgggaggctgaggcaggagaatcacttgaacctgggaggcggagattagagtgagccgagatcgcgccactgcactccagcctgggcaacagagtaagactgtctcaaaaaaaataagaaaagaaaagaaaatacaagaagaatcaagaaatcagggtgagccacagtctgggtaattgacctttaggtcatgttgcaccctgtacttcttcaaaaacacttgtaatggcttttctgtgtcttcttagctgtgttgtaaactccacagagcaagagttggactctgtggttcttcacttttctggtatctagcagaactctggtcctatttagcccctcaatttatatttgagtgttgaaagaagagcagttatctaggtgataacaggttgttgattctaccagaaaaatatacaaactttaatatctgtaacattttttaaaaaataagtcctgggctgggcatggtggctcacacctgtaatccgagcactttgggaggccgaggcaggtggatcacatgaggtcgggagttcgagaccagcctgatccacatggtgaagccccgtctgtactaaaaatacaaaaattagccaggtgtggtggtgcacacctgtaatcccagctctacttgggaggctgaggcacgagaatcacttgaacccgggaggcagaggttgcagtgagccaagatcatgccactgcactccaggtgacagagtgagactctgtctcaaaaaataataataaaataaagattaaaaaataaataaaaataaaaataagctccacatatgcaaggcctcaaaacttggtcaggccaggtacggtggctcacgcctgtaatcccagcactttgggaggccgaagggggcagatcacctgaggtcaggagttcaagaccagactggccaacgtggtgaaaccctgtctctattaaaaatacaaaaattagcctggcatggtggtgagtgcctgtagtcccaactacttggggggctgagacagaagaatggcttgaacccaagaggcagaggttgcagtgagccaagatcgcaccactgcactccagcctgggcaacagagcaaaactccgtctcaaacaaaacaaaacaaaacttagtcaaaaactcagaattgttcccttccacggaaatctttagtaaaagacaaaagacgtatacgatctgaagagaaaccagagtatggacctaattgtgaacactttaattactcttatgcaatattgcttttcctcacgtagaaagtactgaaatgcataacatttcattagtaaggaaggaagtgccaggtatctgtttctcctgtcttcggtggtaacttcttacagaatgtttgttagattccaagcgaatcaaacaaacacagtaaaaaaactgatttactgtttgcactagccaaggcacgtcattttttttttaaatttgaccagtaactgatttatgagtttgtaagccccacattaatatttttaaggtgaaaaaaattgaatcaccaacaaacaatgcatgcaattaaaatatactaatctcataaaaatagaattcctaaaatctttcctaaagcttttaggaaaatagtcacacattacaaaattaaacactaatttgaaaatatccgtatacttttttaattatcacttcaggatgacactgtgtaagtatattctgcattaagctacaatgaaacgaagttgaaaggatactcaagaattagstatgtatcattatatgcagattgtcctctgaaataatgacagagaagtaaattagctcagtgaacaaaaatctgagcaatgatctgctgtctccaaaggacttactggtaaagcctcaaatggacggcatggcatgcttgggatagctgagtcctgccacggtctgcggaagtggaggaatgagagattgatagcactgctaagctggtggcacatggtgactctgactaccagtaaaatgtggtccaatgaatgttttgggctctaaatagttacattagcaatcaatcccttctttcttggttgtttatatgtggctggagtgtggtggtgaagaacggtgttgacaaggattgtcatagcatcaaaagagaaaaataacctctcctctccttaacacgacttaaatattttggagagtccattctcctcatcgtatttgctacttctcgatcccttacagccctcttttttgggggggtggcgggtcactcacccaggctggagggcagtggcacaatctcgactcactgcagcctccacctccctggctcaagcaatcctcccacctcagcctcccaaagagctgggaccacccacaggcatgtgcaatcacacccagctagttttttgtatttttggtagagacagggtttcaccctgttgcccaggcgggtctcaaacccctgggctcaaacgatccacctgcytcagtctcccaaagtgctgggattamaggtttgagccaccttagaaccctcttttaccccttgttgttgttaaccactttttactagctaacaattataataaattttcgtgttcaaattactggtttctatctcctgactaatccataagccaaatgtccatcaccagatgaatggagaattaaattggtatcctcatacaagggaacactacttagtagtaaagaggaatgaaccactgatacatgccacaaggtgcatggctgtcaaaaatatgctaagcaaaagatgccaggcacagaggagtccatagtgtatccctctactcatatgaaattctagactgggcaggaagcagatcagtggttgcctggggccagaggtgatgtggtgggaaattgactgcaaaagggcaggagggagctttccggagcaatgggaaaatgttgtaccttgattgtggtagtgctttcacagacagatatatttgtcaaaacccaatgtactcttacagcaaatacatttttttttttttgagatggagtctcactctgtcacccaggtaggagtgtagtggctcaatctcggctcactgcaacctttgcctcccgggttcaagcaattctcctgcctcagcctcctgagtagctgggattacaggtgcacgccaccacacccggctaatttttgtatttttagtagagacagggtttcaccgtattggtcaggctggtctcgaactcctgaccttaggtgatctgtccgcctcagcctcccaaagtgctgggattacaggcgtgagccaccgcgcctggctagcaaatacattttaatatatataaattgtacctcttagctgggcatggtgacgtatgcctttggtcccagctacttaggaggctgagatgggaagatcgcttgaacccaggagatggaggttttgatgagctgagattgtgccactgcactccagcctgggcaacagagcaagaccctgtcaaacaaacaaacaaataaataaataaataaataaataaaattgtactcacaaatctatttacaaacaaaaaagagccaaaagatttatgtccagtttttattgcatcctactcattttcaaaaacttttgtaaagtttcaaaactttacatttcctaaaattctactcattttggttgattgacaaggactgatccaaattcttacaaaaattttattcaattttggttttttttcaaccagtatgttttggggtggtttggtgtgctgataaaggggacaacctccagactctcactacctgggttcaaatctcacttcttttagtatctataagacaatctgcttaatgttactctagctttaatttccttatttgtccagtgcagatcaaaattaagttattgtgaagtttgaaggagataatacatgtagagtgcttagcacagtccctagaacatagaaagtattcaatatatgtaactcattgtttctgtgtgccagacactgagctagacattttaacatactctatctcattattttgatttttttttttttgagacagtttctctctctctgttgctcaggctggagtgcagtggtgtgattttctttttttggaaggcagttttataattttatttgatatattcgacaatcagtggttagttctcatccacattgactgtctgtagatttttgaaagcatagggatgccatatgggacattccttaatcctttggtcaagacagctttgttaagcctggtatcagtgtgcacatccgtagttcccatgtccttgatggcaaatttccagatctcgctgagtgcccgaggggcactcttcttgaaaccaactccatgaatgcgcttgtgaatgttgatggtatattctctggtcaccagctcactgatggcagaactgtaattcttctcaccacccttctttgcgggaggcattctgaggggcccaagytggaaaggaagagtgcgagggattgtgggcgaagtgcagtggtgtgattatagctcactgcagcctccatcttccaggctcaagtgatcctctcatctcagcctccctaggagctgcagctacaggcacatgccaccatgcccagctaattctttatttattttattttattttttgagtcaaggtctcactgtgccacycaggctggagtgcagtggcatgatcaaggctcactgcagcctccacctcctgggtgcaaatgatcctcccacctctcagctccctgagtaccgggaccacaggcacaagctatcatgcccggctaatgtttgtattttttgtagagctggggtttcaccatgttagccaggctggtctcctagcctcaagtgctatgcccgcctcagcctcccaaagtgctgggattacaggtgtgagccaccccgcctggccaactttttatttttatttttaatagagatagggtatccttacattgcccaggtgtgcaatgtaagtctcgaactcctaaactcaaatgatcctcctgycttggcctcccaaagtgggcatgagccaccacgcccagtcatgaaaatcagtccaagaggtctagcacttcttgcgtagcacttcagaatacaataggtcatgatcactttaatcagatagggccaatggagatatgcagaccctagttccaggcccactcaatgagacatgataaatactgagaggggtataggggggttggggtcactgagcctgtgctgtgttgacaagagaagttcaatgtggcagtcaaacttagcatccaaagtgggccaccatctctagatggcgtctacacggtcagcaaaaggggccgtaagatttagttgttgcaaatggtgacagaaaggagcatccaaggcatctggcattcggaaatccaggcaagcaaggtggcgggggtgggggggtggtggctcacacctgtaatcccagcactttgggaggctgaggcaggtggaacagctgaggtcaggagttcaagaccagcctggccaacatggcgagaccctgtctctactaaaaatacaaaattagccaggcgtggtggcgcacacctataatcccagctacttggaaggctgaggtaggagaatcgccggaacccaggcaggtgaaggttgcagtgagccgagattgcrccactgtgctccagcctgggagacagagtgagactttgtctccaaaaartaaaataatataatataaaattccaggcaagcagcttcaggaagtctatcatggaatcacaggttctctccagttgtaataagaagtcaagaggatatagtgggttgaattgtgtccccaaaaaggtgtgtccaagtcctaatccctatacctgtgaatgtgatcttattcagaaataaaatatttgcagaygtaattgaggatctcatcttgagatccttaatgcagtgcaattatagctgagtgggccctaaacccaatgactggtgtccttataagaaaagggagatttgagatattgagacacacataggcgaagatcatgtgaagacagagacagagcttggaatgttgttgccacaagctaaggagtgccaagcattgccagcagacaccagaagctaggagagagggatggaatggattctccctgggggtcccccagaaggaatcagccctcctgacaccttggttttagccttgtggcatctaaaactgtgagaaaattaacttctgttatttaaaccaccaagtttgtggtaattggttgcagcagccctaggaaattaatgtagaggggaacctgcaagggcccagcctgaaaaaggaactagagacctaggtaggttaccagagcggaacccaagatactaggaccgagggctcctggagagagacacttgcatataaggcagaagctaaattctaaggacctacgtacaatgacaaagtctaaatacaaaagacggtgacaggacttggtagaaggtccaagcagaacccatttgtagcagaaaatggggcagggataggcctgaaaatccacatcaagtgtcctcatctatgggaaggaaaagctctaaatagaccagaaactgaaacagggtagtggtgttgttgttgttgttgttgttgttgttttgttgttgttgttgttttaaaagcagagacaaagtctcgctatattgcccaggctggtctcaaactcatgggctcaagcaatcctaccacctcagcctcccaaagtgctgggattacaggcatgagccactatacccagcaggatttgggttttaaaaggtcaatcaacaacttcatctttcttccctaagattggaaccaattgagaaataagatataggatgccaacagatggagaacagtttctattattaaatgtagcctctgttaatgctaaagccggctgggcacggtggctcacacctgtaatcccagcactttgggaggctgaggtgggcagatcacctgaagtcaggagttcaagaccagactggccaacatggcaaaaccccatctctactgaaaatacaaaaattagccaggtgcaatggcgcacacctgtaatcccagctactcgggaggctgaggcagaagaatcacttgaacctgggaagcggaggttgtggtgagtgcagatagcaccactgcactccagcctgggtgacagagtggactctgtctttaaaaaaaaaaaaaaaaaaaaaaaaaggtaaagctgatctgaagaaagagcaggtctgtggcagagatttgctacattactttccatcccttcaatcttttcttcccrctgaccaaaccctggctcaggccaccgaaggggatatttgaatctgtagagcatctacatttagttcagtattgctgtcccatgtaagccccaggtgggaaggaaatagaagactctccaatgcttgctaactttaattagattagcgccatccaatggagaaatgaagaccatgaactactttgcaaacctagcaggcaggggaggggtgaagtgggggccaacagtgttactgtagtagaagttcctctacatggaaacgtgaggcaagaggaaaggaagttcctccctaataggtggctgtttaatcagaatccatcccctcctccttcgttgtgtagtgttcatgtccttcacatggtattgggtttacacctagctctaggatgtctttgtgaacctatattccttttaagagttactgactcagggatgaacagttatcctaagctggcctaattaggatgaggttcagaacttttgtttgatagttggagaaaggaacatcctcttcttaccttgggtgtaaatatgatatataccgtcccaaaattaccagtagccttacaaggaaagccaggccaaggatgaagccaatatacagaatggagcagagccaagaatatcactgaaaagtagactatattataaactctggctcaaatcatacaggaagcctactcaatatctggaatttgtcagttaatgtgagccaatgaattccttttattgtttcagccagtttgagttattttctttaactttcaactgaatgtttactctcaaaataaggggaatagtctctaagatccnnnnnnnnnnnnnnnnnnnnnnnnnnnnnnnnnnnnnnnnnnnnnnnnnnnnnnnnnnnnnnnnnnnnnnnnnnnnnnnnnnnnnnnnnnnnnnnnnnnnnnnnnnnnnnnnnnnnnnnnnnnnnnnnnnnnnnnnnnnnnnnnnnnnnnnnnnnnnnnnnnnnnnnnnnnnnnnnnnnnnnnnnnnnnnnnnnnnnnnnnnnnnnnnnnnnnnnnnnnnnnnnnnnnnnnnnnnnnnnnnnnnnnnnnnnnnnnnnnnnnnnnnnnnnnnnnnnnnnnnnnnnnnnnnnnnnnnnnnnnnnnnnnnnnnnnnnnnnnnnnnnnnnnnnnnnnnnnnnnnnnnnnnnnnnnnnnnnnnnnnnnnnnnnnnnnnnnnnnnnnnnnnnnnnnnnnnnnnnnnnnnnnnnnnnnnnnnnnnnnnnnnnnnnnnnnnnnnnnnnnnnnnnnnnnnnnnnnnnnnnnnnnnnnnnnnnnnnnnnnnnnnnnnnnnnnnnnnnnnnnnnnnnnnnnnnnnnnnnnnnnnnnnnnnnnnnnnnnnnnnnnnnnnnnnnnnnnnnnnnnnnnnnnnnnnnnnnnnnnnnnnnnnnnnnnnnnnnnnnnnnnnnnnnnnnnnnnnnnnnnnnncgtgagcctccggcgaccggccagaactagctcttcttaaggatgtgacagtgatctgcactagagcttcaggcagctaaggtaggctttcctggaaatcagcccataagatgagaaagaaatcttttttttktttttttgagaaggagagtctcgctgtgtcacccaggctggagtgcagtggcgcaatctcggctcactgcaacctctgcctcccgggttcaagcgattctcctgcctcagcctcctgagcagctgggattacaggcgtgtgccaccacgcccagctaattttcgtgtttttaatagagacgaggtttcaccatcttggccaggctggtcttgaactcctgactttgtgatctaaccacctcggcctcccaaagtgctgggattacaggcatgagccactgcgcctggcccaagatgaggaagaaattttagcagccttctgcagaaggtattttcctgggttggctgggttccttccatcaaaccaaaatcaagagtatatgagtagaaattaaaatgcagattttctatcaaaagttagaatactcataccctctgattcatcaattctgcatctcagactttctcctacagaaatatgcaagtaaagaatatgtgtacaacgtcccctgaaacattgctcattatatttaaaagtggaaacaatcttattcctaccaataggaaataggaagcagttagctgggtgtggtggctcacatctgtaatcccagcactctgggaggcaggaggttcctttgagcctaggagttcaagaccagtctgggcaacatgatggaactctgcctatattaaaaataaaaagtaaaaaatataaaaaaaaattttaaataaaaataaaaaagacaaaaaatgaagtggttaaatagattctggtatatctgatacaatgcatgctaagaatgaggttacactgatggaaaaaatatctaatatatggctgaatataaaaggcaagaaaagacagctgggtgtggtggctcacacccataatcccaacactttgggaggctgaggtgggcggatcacttgaggtcaggagttcaagaccagcctggccaatatggtgaaacctcgtctctattaaaattacaaaaaattagccaggcttggtggtgcgcacttatagtcccagctacttgggaggctgagtcagaagaatcacttgaatctgggagatggagggttgcagtgagctgagatcgtgacactgcactccagcctgggcaacagaatgagactccatctcaaaaaaaaaaaaagcaagaaaagaaaaatatatagttcctatttttgtgttaaaaataaactgtatacatgtttgtgcatgaaaacatctgaacagcttccatttgttatttttcatatttctatattgttaaaaattgacaacaggcatctattgctttttgtamttcaaagcctttctttcttaagtccgtgtgtgtttctgtgagaaaagatgatcagcattgtgaatcatggctattcttatataaatcactcaaatttgtaactattataatgacttattagtgagactaatttgaataactatacatatatgcatatgtatacatggatgcatgaacattcattaattactcaacaattcttataatgcctactatatgccaggtaatgttccagggatatatcaatgaataaaatcctagagatatataatgctgtacatatatacattcaaaatagtctgaagagtataaataactatgaaattgaaaggattagccaggtgtgatggcatgtgcctataaccccagctaccrgggagactgaggtgggaggattgcttcagcccagagttgcaggtggaagtgagctatgatcgcaccactgcactccagcctgagtgacagaacagagactttgtttyttaaaaaaaaaagtaaaaaaagagaaatgaaacaaagtttgcataattttcaatcatcaaaaaaaccaatttggctactcagtgattaacttgattttatgttacaaatttgtaatctttctcaattccatctaaaaaccttaaggttgaaaacactccagtagccaacggaataacactatcagtcttgatctgagtatattttggatccagcatctttaaactctggccacatgccagactttgaacctgagttctctgttacagacttcacatgtgatttctctctctcgctctctttttcttttttcttttctttttttttttttttttgagatggagtctcactctgtcacccaggctggagtgyagtggtgcgatctcrgctcactgcaacctccacttcccgagctcaagtgattctcctgcctcaacctcccatgtagctaggattatgggtgcctgccaccatgccccctgctacatacaatttctcttgktcttttttttttttttttttttttgagattaggtctcactccgtcatctaggctagagtacaggcacaatcatggctcactgaagcctccacctcccaggttcaagtgatcctcccactcagcctcccragtagctggatcacaggcatataccagcacacttggctaatgtttctttgtttgtttgtttgtttgtttgtttgtagagactgagttttgctgtgttgctcatgctggtcttgaactcccagacttaaatgatctgcccacctcagccttgtgaagtgttgggattataggcatgagctatggagcctggccttcacatgcaatttctaacacctcttttaaatcacagaaatctcactcatctattctttcccactttgaattcagaggcacttgtaactggtcccacaccttttagtattgcaatattattctaagtgtattaattgttttagtctgtttggcctgctgtgacaaaatgccataaactgagtggcttataaacaacagaaatttatttactgcagtctggaggctgggtagtccaaggtaccagcaaattcattgtctggtgaaggctagtttcctggatgatagatggcaccttctcactgtgtcctcaggtggtaaaaagaaaagaactagttctcctggggtctcttttataaaggcactaatcccactgataaggtacccgccttcatgacctaatcatctcccaaaggctctacctcccaacgcctcacattgggggttaggatttcaacatgtgaatttggggaagacacaaacattcagacaataacattaatgttttcttccctacttgtgcagctaagagcttccggaggtagggagctgttttctctcacctcacatccacacatcacacagtttatactttcagaagattgattgattaaatgcatccctcagcctccccaacaaaggccgtatatctactctaaaaatagaacacaaatcctctgtcctttttagtcataatcaatgtgactgttcataaggcaattattttaagtttagcaatttagccataatcccattattgaattaggcttgaaatcttagaaacttcaggatgtttatttgccatggctcccttctaagcaaacatcatcctccaagtctatatcccctccacaggcatcatttctaaggagcaatgttagcttacataatagtttttggaaaatgttttggaaagtatctattctgtttgaggaaaagtatggactcattctcctctctctctcttaagaattcttctcctgtgactatttcctttaacttcagactcaaacagtaattaaagatggcaagaaaaatgccaggagaaaagcccatttaattgtactgttggaataattgttcctgacttctagcttgcccattgtaattttgtgggttggggggaggaaaaaaattagtatcagactgcagcaatctccaaacgagccaaaattataatctggtgagtgcctatttaaagtaacagaatccaaggcaacataagaggcttaattttggctatgcatgttattacctaagagtaggagagagcattatctagtagcaaaaagccaggagcatgaatcaaccactttagatttatactcccctttagagtttacgatggataaaataactttatgtccctgtgtttagcttctctgtccttaatatataagcaaactctctatcattcagcgaaattgttgtctatataagctgaaaaaaacatcaagctcctcaaacaggttgactagtaaataaatggcccaacacaaaaagggtaatctcagttttaatttttttttraattgacagataaaattatatgtatttactgtgtataacaatattttgaagtatatatacatggtataatgactaaatctagctaacatatgcattacctctaatctcaatttaaattggggaaatcatacttttcttttactttttttttttttttttttgaaatagagtctccctctgttgctcaggctggagtgcagtgggactacaggcgtgtgccaccatgtccagctaattttttttgtatttttagtagagacaaggtttcaccatgttggccagactggtctcaaactctagacctcaggtgatctgccaaattcagcctcccaaagtgttgggattacaggcgtaagccacctcacctggccatatttttctttttctattttcaattttaaaaaatgtattattaagtagagacaggacctcaccatattgtccaggctggtctccagctcctgggctcagacaatcttccrgcctctgcctaccaaagtcctggaataacagacggcagacatgagccattgaacttgccccatatttttcaaaagtgaaattttgcaggcacctgtagtcccagctactcagaaggctgaggtgggaagatcccttgagcccaggagttcaaatccagcctgacaacacagcaaaatcccatctcaaaaagaaaaaaaaaggccgggtgcggtacggtggctcatgcctgtaatcccagcactttgggaggccaaggcaggcagatcacctgaggtcaggagttcaagaccagcctggccaaggtggtgaaaccctgtctctactaaaaatacaaaaattagccaggcgtggtggtgggcacctataatcccagctacttgggaggctgaggtgggagaattgcttgaacccaggaggcagaggttgcagtgagctgagatcacgccattgcactccagcctgggaaacaggagggaaacttcgtctcaaaaaaaaaaaaagaaagaaaaaaaaagtgaaattttttctctaaggtagattatacagccgatcctgaacaacactggtttgaactgtgtgggtctgcttatatgccaattttcttctgcctttgctgcccctgagacagcctgttcttcctcctcctcctcagcctactcaatatgaagatgatgaggatggagacttttatgaagagctacttccacttaataaacagtaaacatactttcwcttccttatgattttcttcacattttcttttacttagcttastttaagaatacaatacataacacatataacatacaaaatatgtgttaatcaactgtttatattatccataaggcttgtgctgtacagtaggttattagtagttaaattctgggggagtcaaaagttaaatgcaaattttctacttgaggaagtgtcggtgcccctaacrcctatgttcaagagtcaactgtaattcaagttatacattttaatttttttcttacactagtaaataccagactgagaggattgaaggtttgactcatttcacacatctttgcttgatctccttagctcttataaacattattaaatgtacggtcctttgtgattaaattattatcatacgtgtgatatgaaatagacttctgagttgggcatggtggctcatgcatgtaatcccagcaactcaggagkctgaggccagagcatcacttggggccaggagtttcagagcagcctggcaacatagcaaactccatttctaaaaattatttaattaattcaataagaaaaatttttaaatgactactaaaaaatcacaaaaataatarcatattttagcctttaaaaattagtagagattgggtgcaggggctcatgcctataatcccagcactttgggaggctgatgtgagaggatcacttgaggctaggagtttgagaccagcctgggcaacatagtgagaacctgtctcaacaaaaaatacaaaatccagccagatttggtgccatgtgcctgtagtcccagctgcttgggaggctgagatgggatgtgtagaaagtaaaaagttttctcttcaaaatttcccttcttgttaaagaataaatcataagtgttagaagtaatagtttcttttaaagagtaacttccctcaagcctccttgctttatgctaataactcttggttaagccctatcctatgtagctkctagatataagggaatgagtacattctatgtctttgtactttaaccaagatatttgtttcctttcataagcaacttcctctttttctttgttctcctttgcttttacctatttaggaaagttttaagttattagccagtcaggtttaatttagattgtgaggtccagctccagccaatggagacaggacacattagcagggacaagctgtgtaaggaataaaattgcttccctcctttgttcrggtgtggtctcaccattgttccatctgtgaggagcaccctttctgcagaaggtaaaattgccttgctgagaaaactttttgtctaaatgctgatttttccttgtggtaccaaggaacaagcattctatttctaaataaacatttttggcggggggagggatagcattaggagatatacctaatgctaaatgacgagttaatgggtgcagcacaccagcatggcacatgtatacatatgtaactaacctgcacattgtgcacatgtaccctaaaacttaaagtataataataataaaataaaaaaataaaaaaaaacacaacattttacttctaacaggagggttgcttgagcctggaagatcaaagctgcagtgagccatgattgttccactgcactccagcctgggtgtcacagttagactttgtctcaaaaaaaaaaaaatgaaaatacataaaaatgaaaaatagaaatgaatagagaaaataataggtaaccctcagacatcagttttgaaattttaagttattaagaacataaaattaaaaaaagaacataaaattcaagcttacaatacccacttaagcctttttataaattccctttctacaaatctattatagttatctataaactgaatccattataaataccagtgaaaagagtgagtgaagaatatcttacttagggatatatactatataaggtatagctagaaattttaaaatatggtggagccaccttgtcaacattgttgggtaaaaagtgagttctggagatgcctctaagataacatacggccagattataataaagaaataagacaataacagaatttaaaatgtttaacttttaaaaagttaccaaaaaatggaaagcttataaggttaatatctgaatttaggcactaaaatattgtccatcttgtaatgtattttaaaatgttatcactggctacaggcaggcattagctacacaaacgtagcaattaatgtgacagcagttgagtgttgaggccaaattagagggaattatttattcttgttgctaagattggaagtgtataggaggcacccagaagctactataaaagaggttatggttaaatacacactactttttatattcgtattaaaacatacaatttcacaaaatcctttcaagaaaagcaaccctaaagcaagtgaaaggtagaaaacaattgcaatctcatgtctgttttgaacaaatctcgaataactattgagcttttttcttaaactttttgttatagaaatttccaaacacacacaaaatagaaagaatagaataatgagcacccatgtatctattacccagattcaacatttatcaacatatggcaacatttatcaacatatggccaatctatttcatttacaacccctctgctctcaccccctgcacactagattatttaaaatcaactgttggtcagggcatggtggctcatgcctgtaatcccaggactttgggaggtcaaggcagggggatcacttaaggtcaagagttggagaccagcctggccaacatggtgaaaccctgtctctactaaaatacaaaaattcaccaggcatggtggtgtgcacctctaatcccagcttctcaggaggctgaggcaggagaattgcttgaacccaagaggcagaggttgcagtgggccaagattgtgccactacattccaacctggactatagaacgagactccgtttcaaaaaaataaaaaataataaaaaaattaaaaataggctgggcacagtggctcatgcctgtaatcccagcactttgggaggccaaggcgggcagatcatgaggtcaggagatcgagaccatcctggctaacacagtgaaaccccatctctactaaaaatgcaaaaaattagccgggcgtggtggctggaacctgtggtcccagctactcaggaggctgaggcaggagaatggtgtgaacccaggaggcggagcttgcagtgagctgagattgtgccactgccctccagcctgggcgacagagcaagactccgtctcaaaaataaataaataaataataaattaaaattttaaaaattaaattagaaaaataaattaaaaaatcaactgtcaggccaggcatgatggctcatgcttgtactcccagcgctttgggagcccaaggtgggcagatcacttgaggtcaggagttcaagaccagcctggccaatatggtgaaaccctgtttctactaaaaatacaaaaattagctgggcatggtggcaggcaactgtaatcccagctactcggaaggctgaggcaggagaatcacttgaacctgggaggtagaggttgcagtgagccaggatggtgccactgaactccagcctggggaacagagcaagactctgtctcaaaaaaaaaaaaaaaaaaatcaactgtcagatatcacatcaggtcattccatgagaaaatactgtaatacgtatatctaggagataaaactctttttgtcttttcaaggcacaatcagaattccagtgtcacatctacaaaaaatgaaccccttaatatcacataacatacagtcggtaatattaaaagtcttactggtcaggcacggtgggtcatgcatgtaatcccagcactttaggaggcctaggtgggaggttcacttgagcccaggagttcaagaccagcttgggtgaccctatccctacaaaaaaaatttttttaataaaaataaaaaaataggtcttacttatagtcacatagcttagataatatttagtagtaatataaaatgttttcaaattgaactatataggaatctaaatttttgagattatttccatgtaatacttgaattgtttgttgtattaaaattaccctaaactgaacatataaaccacattcccatgtttaacagataggttggttaattttatccaaggtctaggaatatagcaagttgattacaggacaagaaacagcaaaactgaaatccaacttctctgcttttgaaaataacctctctgaattcagaaaaggagtaatatcttgatagcctacttgctaaagccatggctacttttcaactggtttgtactgctattgttgcactcaatgttaaaatattaaaattcttctgaaaaggttggtaaccagctactaccctgtactcccaacccgaacctaccagattctcttcccccattcctcaaaccctgacttctctgcccctgggaagagcaggcctgggctccccgctccacatccctcttcacatggcatctgcatgtggtctgtacagcaaggtagttggacttcttaagtgcaggtcagggttcccaagagcaaaatgtggaagataccagtctttccaatacttaagcctggacttagcacagcatcacttctgccatattttattggttaatagagtcacaaggccagcctagattcaaggaactatactggggcctgcataccaggagtgtttcatggggtcaagggaggtggaggtaatcaatgaaactggcaagcacaccatgccaaggttcagtatattttacctattgtatgactatctggcagctgagaaaaaagaaatactctaaatggctcagctgtattgcaaactatagcatctttcctaatgcagagttgtacaaactagagtagagagggcttatgaactattttgagtataggagtctttgcagcaacttgatcaaaaagcatacacctagatatggaaatattttgttatacaaactctttgtagatatatgtgttataatgaaatttccaagctgggtaaggtggctcacacctgtaatcccagcactttgggaggccaaggtggccagattgcttgagtccagaagtttaagaccaacctgggcaacatggcaagaccccatctctggccgggcgtggtggctcacgcctgtgatcccagcactttgggaggctgaggtgggcagatcacgagatgaggagatcgaggccatcctggctaacacggtgaaaccccatctctactaaaaatacaaaaaattagccgggcatggtggtaggcacctatagtcccagatactcaggaggctgaggcaggagaatggtgtgaacccaggaggcagagcttgcagtgagccgagattgcaccactgcactccagcctgggtgacagagcgacactccgtctcaaaaaaataaagaaaagaaaagaaaaaaaaaagaccccatctctacaaaaaagaaaaaaaagagactacttctctacaaaaaaattttttcaaattagtcgggtgtggtagcgtatgcctgtactcccagctactttggaggctgaggcagtaagattgctggagcccaggaattcaaagctacagtgaactatgaacaccatgcactccagctagggtgacagcgttagacactgtcaaaagaaagaaagaaaagagagagagagagaaaggaaagaaaagaaagagggaaagaaagaaaaagaaagaaaggaaagaaagagagaaagaaaagaaaagaaaagaaggaaagacggaaggaaggagagaaagagggaaagaagaaagaaagagaaagaaagaaagaaaagaaaagaaagaaagagaaagaaagaaagaaagatctattctcttaaccagacagcatagtatagcagttaagtacaggactctggaggctgcctgtctgggtttgagtcctacctgggctgcttactcactagtggtcttgatttcttttttttttttgtccctttaattttacttttgtcaaaacattttcaagattactttaatttttacaatatcatttaagggaaaactagtgagtttgttgaagaaaacaagaaacagatttttttaaagccattgaccacgaaataagcattatgtttcaaagaccatgaaaaagttatttgtctctttttggtctcaactagcgagggaggtgagaccaaactgctcaactgctggacaatctcagcaaacacacccactgttgagacttattgagtgactcaatgttggctagaattgtccatttagctggaggggaaragggagggaaggatggatggaggagtgaagtatggaagcaggcatcaggccacttcccrtacctctcccaaactccaaaggcaatgatcacattggagggtcagctaaacacaaagggaagtgaagaaagaagtttgaagattttcctgtttccaaaaatcacatactttcctcttttgagtattctatagaataactctctacatttcctagtttgtggaaattttctctayggcataactactctaaattgtgcaattttcctcatatcagacttatttttctctatacctggttccctagcaaacctgagctttatttatatatctgatatgcaccccatctccacagctggcattcaattgcaactctaaattctaaagtgctcagrgtcaatataatgcaytgacgattcagacctgactgggcattttcactgcataaatctaaaaagtaaacaatctcattatgtttgagaggatggatggggagaagactgatctatatttccactaaggtagccaagaaatattcacatgaagggacaatgggagaggagctggcaagrgtttgggcagtacttggaagatgcattccttatcatatagattacatatggcagtgaattgacagaggattcactgggacatcttcagaaagtaagtaatgtgtttcaacaccactaaagtgttaaaataggcytcttttcttctcgccagtatgaaaagttagacaggagtcactcccaagaatagtaaaggacactcactggggacagtcatgatgggtgaagaagggatacatatttttaaggcagcaggaataaatttcatcatccttcccagaagacagcaagaattattcaaggtggccaccaagtctggaaaccaggcaaatcttttaacaaatggtttattgatatgttataatgaatgacaaaatattagtatctaattctagactttatggccaccccataggatgaatctttggaacagaaaaaaaaataaagaatttgttttctcataatcataaagctgttatactcagtccaggcacagctagtacaacattctgctcaaccccacaggctccattccctttaccacatatttataatatgtttgggtcactcataggagtgaaacactgtcagcatcaatagttagcagcactttcaaaatacattttattgtcccgaatagaaaccttaactattcaattagtccagtaattccaaatggtcttattacttctatacataagatatgatcttacaacatttatgtagctaaatacttaacttcccatgctttttgaggattcccaaaagactttagggggttcccaagactttcagggttttttttttttttcacaataaaagaaakgaacagtgtcaatccataaagtcagaccagcagtttaataagatcctcttcatagctcagttctcagtgcatacagagattcaatatagccccatcactctcagttattagaatctgagagggataagagcaataactattgtttaaaagcctaagagtgaaaacagatgtcaaaaaaaaaaaaaaaaaaaagccaaattctttcatcccaggatrtctgaaaaggagagactctatggagtgtggatgtagaaaaggagttattcctaccggaaaaaaatgaactgtggacacagtcactcaagaccagagaaacaaccactatgagtaagtagcttcaatttcactgttaccaggagggcacacaccagaaagcctgggacaaagcctgggctagagccctcaggattcattctcaggcttcctggtgctgtggttcaacagcctttgtggggatggggagaaccagagactatcaccatcacatgtaaaaaatattaccacagcaacagctgtcaaaaaccagctggagctgaagttacacaccatttgaaatccacactgtacttgctttcttgtgatgggcttgagacatgtgcagagacaccttaaacatgtgtaggtgaccacccttttgaaaggcagaggagggcctcttcatgaactctttctactcatttgttttcctatcagttcaccatttcaactagaaaagatgctgcaagctacctcagctagcttctaatttggacacagcaccaatactacacacactattgaatgaatgaccacatcttcctggttcttccwttgggcagggtcaatatgcttctttggactgaataggtgtgatcttgtttgagaaaagtgtgtaaacgtagggccagattttgttcgtctcygttccggaaaattggtggagcactcctyggctcttgtataattcaatgactggctttgccgcgtctttgtactgtcttagcctggcagcaactgcttcgggtttatcatcctcctgctggactaayggttcaccagtgacrtcatcaataccatgtacatgaggtggattgaagtccaggttatatacccttccgctaggagggtgaatccaacggcggctgagacgatctttaagtgtttcaaatggaatattcaaactgatcactagatccacttcacagattttgtccagggcytcggcttgtcctaatgtcctaggaaaaccatcaaggagccagtgctgkccacgcctattctccaactcrgacatcattaggcgtgtgatcacatggtctggaaccaaaagacttttctctatatactgctttgccayctcaccaacttcggtgctggccttgatgttctcccgcaagaagtggccgctggagagatgctggagaccaaagttctgggcgatcctctggcacacggtgcccttgcccgagccgggcggcccgaggatgaccgcgcgcaggagtttggaagccattgccttcgcgaggaggggggcggtcaaacgcgcagccccgaccgcggccccggagggagccccrggaactttgtttctcggccccctacctctggcaccctccgctctcactgggactcgccggccgsccctacagggggaaggcggtcttgatttcttaatctcatgcttcagtctcctcacctgcaaaatgagaatggtgataataggacctacattagggatgtgatattgtgaaatatttatttggtcttcctaccatctcctggcataaaatctttggaatctcccaagtgataagtgtctttttgtaacctaatgagttgactgatggctggcagcccctaggtggcttcaggatggaggttgggcacgtgaaagaccaagacaaaatcagagagttatgattttcagccctatccaacttctgggaaggggaaggggctgaaggttaagttaatcctgacggccagtgatttaatcaatcatgcctacataatgaagcctccataaaaaccccaaaggtctggctgggggagcttctggatagctgaacacatggaggttcctggagggtgcctctcaccccacatagggcatggaagctctatgccccttcccataccttgccctatgcatcctttcaagtatcctttacaatatatatatatttttgagacggagtcttgctctatcaccaagctggagcgcagtggcrcgatcttggctcactgcaacctccagctccctggttcaaacggttctcctgcctcagcctcctgagtaactgggactacaggcacgtgccaccatgcccagctaatttttgtattttttgtagagatggggtttcaccatgttggccaggatggtctygatctcttgacctcatgatccgcccaccttggcctctcaaagttctgggtttacagacgtgagccaccgtgcccrgcctttttactttactttattttattttatacagagcctcactctgtcatccaggctggagtgcaatggcacaatcttggctcactgcaacctctgcctccctgttcaagcgtttctcctgtctcagcctcctgagtaactgggatcacaggcacctgccaataatattctttataatraactgataaatgtagatatgtatttccctgagctctgtgagcagctctagcaaataaatcccccaagaagggggtcatggaaccstgatttatagttggtaggtcagaagcacagacaaaacaacctggggcttgcaattgcaytggaagtgggactgagtcctcarcctatggcatctgacactacccaagtagatagtatgagaatcggattgaattagaggacctgccccccccaccccctgctgccaccaccaccacccagctagtgtccattgcagaatttttcttagacagggtcttgctctgtcacccaggctggagtgcagtggcatgatcaaggcttactgcagcctatcaacctctcaggctcaagaggtaatcccacctcagcatccctagctgggaccataggtgcacccccttgcccttccccctaattttttttatttcttgctggtggagagaaactcccacacatttggtcacagaagtcttctgtgagactggtgtgagagcagaggaaaaactgttttttctactcaatgggttattgataactaaattagttaatgtctgtaaagtacaggataatgccaccgagtaactactaggtaagcatttattaaatgaaacaccaatttcaggttaaaaaagaaacctgaaatgttgattctgttgaataaaaagtataggagrttgtttttttggattargtttctgtactakgctccaacagacaaaaccaaaaatcaaaatggagtcacccatgctaaagttctgtcaccaaacttcaataagttgttatctgatcttcagagtgagaccagtgggctgggggaagttcccaaacactgatgaaaccctgacccaggccagtgtgcaggttcttgataccatgatgagaaggaattcaaggatgagtcagaaaatcgtgaaagtacggagatttattgcaaagtaaaaatacacactcaagaaaggggagcatgggcatactcatgagagagctgcacaaaggggcttggggtttcttatatgrgtttctttacccaaggggtggactattcatgaagattcctggaaaaaggtgaagatttctcagaactgtgatgctgcccattttaacaccaaatacagtgttcttgtcacagtgtaggtgggtgtgcgatttgtttattaatgrgtgaataatgaggtcctaggagaaacctaggtcaaatcctgctctctgttgggtccagttggttttagccagcttggcccacatcctgtttttcatggtcttatcagtccccagtttatggagctatttcaacagtttcattttgctaggcatgtgaaactgctgcctggaattttctgttctcttgcaaccaccctgtattattcctgtctcaagagaaagcaggagagagagatagccaaattcccaaacaggtcacttaatcttcaagagtcacgataatgagtttccctctgctttaatcctttcacacacagaaaaagtagccccaagaarcctgatgttaactaatcagttatttttctgttgttctatctccttgtctcatcttacaagaaaagtcactttgaaacaatggacataatctttgcttcttcttttttttttttttttcctgagacagagkctcgctctgtcrtccaggcaggagtacagtggtgccatctsagttcactgcaacctccacctcatgggctggtccaccatgatcctcccacctcagcttcccgggtagctgggattacaggcatgggycaccacacccggctaatttttgtattttttagtagagatggagtttcagcatgttgcccaggctgrtcttgaactcrtgacctcaagtgatccacccttctgggcctcctaaagtgctgggattacaggtgtgagccactgcacccagcctgcttctttcttcattccttcttgctctgtgaagccaatgccttctgctcagctcatgattctgttttgtggaacaaagtgttacctgtttctagaattgcaaataaagccaattgagatttttttttttttttttttttggcagaktcacactctgttgcccaggctatagtgtagtggtgagatctcagctcactgcaacctccaactcctgggttcaagggattcttccacctcagcctgccaagtagctagaactacaggtgcacaccacyatgcccggctaatttttgtatttttagtagagacaggatttcaccatgttggccaggctggtattgaactcctaacctcaagtgatttacccgcctcagcctcccaaagtgctgggattacaggcatgagccaccgcacccagcccaactgagatatttaaactaaacttgttgtaactttgtcttttgacaagtctaagaatatcagtaatttttttggcaaccagtagatagccccttccctttttttaacttcccaaaaggcaattgaaccaaatcaaaataatttaccaagatgtaatctaaacacttccctcattcaggttttccccagttattaactatgttaacataattagtggctatgccaactcatgatatgttctttttttaaaaaaacrtttctgtagccaggcatggtggcagatgcctgtaatcccagctactcaggagtctgaggcaggagaatcgcttgaacctgggaggcggaggttgtagtgagccgagatcatgccacttcactccagcctgggcaacaragcaagactttgcctcaaaaaaaaaaaattgtttttgcrattatttaatcagactttcttaagactttgacctttatgcacttttaccttccttaataactcttcaaaagaggccttgaaaaaaatgcaatgactagcaagttatgggagtactggaatgmaatgactgttcaaaggttggtttcacccatagccatgagtgtcatagtcccaggaagatgggttgaattcagggccactctaggaattttgcttgcrgtttcataagcatagactattccagactccacatcctttttacctacaatgagtcccaaggcaaacagaacactgtgaagtgggagaccagaattaatctagttctcgtcagagtattctaggataaattcccaggccaaattaccactgacaattttagaaaccctggattggataaattcattatgataaagattaaaatatcaccttatgtttatgtgtcgtgggagctttttttttttttttttttttttgrgacggagtctcgttctgtcgcccaggcgggagtgctgtggcgcgatctccgctcactgcaagctccgccttccgggttcacgccgttctcctgcctcagcctcccgagtagctgggactacaggcgcccgccactgcgcccggctaattttttgtatttttagtagagacggggtttcaccgtggtctcgatctcctgacctcgtgatccgcccgcctcggcctcccaaagtgctgggattacaggcgtgagccaccgcgcccggccgtcgtgggagctttttaaagggttttcagtcttatgaatagtctcagcaatattgaaagactaatatattaatagtaattattgcttcatgttaatcagcattccaaagataaggggtcaaaacaggttattaattataaatatctgtggctcctctggcctggaagtttctctgaatctgagtgaattagagtgtaatgagtgtcccctttgccttccctgcacttagtacatgtacctaccaagtattgagyactgaccattaaaattgtaattctcttcttttcttctcatttttattttttgtgatgctataacaataaagaagaaaatctaaggcttacataatcttaccacctcaatgcaattatctccatttccactgatttccttccagactttgtccagatgcatacaggcttttacataattatcatcacagtgtatgtgcttcttaattttactttttctccatttataccaactttcattcaaattgtttcataatcatcttaattactacagcttcatattcctgttagttggtatgtgataatttacttagctatttatctatcaggagacatgtaggttttttccaaattttttccctactaaagttgagacgaacttttctgttcttatatattccttggattatttctacgtaatacatttataaggatatgattataggttgtggccaggcacggtggctcacacctgtaatttcagcactttgggaggccgaggcrggtggatcacctgaggtcaggagttcgagaccagcctggccaacatagcaaaaccttgtctctactaaaaatacaaaaattagctgggggtggtggcgcatgcctgtagtcccaactacttgggaagctaaggcaggagaattgcttgaacctgggaggcagaggttgcagtgagctgagatcgcaccactgcactccagcctgggcaacagagcgagaccctgtctcaaaaaaataaataaattatagcttgtggyagattgtatgttccaaaagcagccacaatatcctcctgatcctagtgctcttctgcaatgtgatcttgtcactctcctttgaacctgggccctgtgactgctttgaccaatagaatatggtaatagtgacattgcgctttttcaggtgcagcccttgtttggcctggtaacatctacttcccacttcggcgaagtgcaactattctgagagcccccatgctatgagaagtccaagccacatgaaggggccctaggggctccagtgctaggtatagaacaagaaaagctccagagcatttgagagactgtgaggaaagacaccacctgggaagtgcatgttccagatctcattacccgacagaaagccaggcagacaaactgtctagcagagcccttcccaaatttcatactcacaaaactgcatgcaaaataaatggttatataggttgaacatccttaatctgaaaattcaaaatcgtaaatgttccagaatccaaaacttttttgagtattaacatgatgccacaagagaaaaattccacacatgacctcatgtgatgagttgaagtcaaaacaaaggctgacagcacacagtttacttagcattctcagaggaaaaaagaccctcccagtcctcttcagctgtgatatcttttctgcatctgttcagattccttcgtgcaagcgcatccacaaagcataataaaataaaaactttgtttcatatacaaaattatttaagatattgtatgggctgggcgcagtggcttacacctgtaatctcagcactctggggggctgaagtgggcagatagcttgagcccaggagttcgagaccagcctgggcaatacagcaaaaccctgtctctaccaaaacaataataataataatacaaaaatttggctgggcacagtggttcacacctgtaaccccagcactttgggaggctgcagtgggtgaatcatctgaggccaggagttcgagaccagcctggccaacatggtgaaaccccatctctactgaaaaaacaaaaatgagctgggcatagtgctatgcaccttaatcccagctactcgagaagctgaggcacgagaatggcttgaatctgggaggtggagttttcagtgagctgagatggcaccactgcactccagcctgggcaacagagtggcaccctgtctcaattaaagaaaaaaatacaaaaattagctgggcaggatggcatgggtctttagtcccggctacttgggaggccgaggtgggaggatcactcaaacctgggaagttgaggttgcagtgagctgagatyacacccttatactccaactggagtgacagagcaagaacctgtctcaaaataaataaataaatgattaaaaataaaatattatataaaaccaccttcggtctatgtgcataaggtatatatgaaacataaatgaatttcatatttagacctgggctccattcccaacagatctccttatgtatatgcaaatattccaaaatctgaaacagttctggtcccaaacattttgcattaaggatactcaacttgtattaagccgtcaagtctgtcagtagttacctaatataaaggtacttgaracacaggtcaaaagataaattttcttttcccacacactggcaagagtttctaatagattgatcctgtttatacaatttgcagtgcccttaaagagtctgtgcttttcagggtgcaagccttagaagactgttctctgccctgagtctgagtttcttcatttaaggtgccatagtgtccagctttttagagggcatttaaattttgcctcttttctgagtaggtaaccccttactctggaagtcctccactaattttcttatcttcaccagctctagttttcttccttcttgttctccctaattctctctcatcttctgctctgctcatcttcaaacaaaagtaaatgctactcagctgggtacagcggctcatgcctgtaatcccagcactttgggaggccaaggcaggcagatcaattgaggtcaggagttcgagaccagcctgtccaacatggtgaaaccccgcctctactataaatacaaaaaaatgagccaggtgtggtgacagacccctgtaatcccagctgttcaggaggctgtggcaggagaatcgcttgaacctgggaggcggaggttgcagtgagccaaggtcgcaccactgcactccagcctgggtaacagagcgagactccatctcaaaataaataaataaaataatasctactggtgggaatggttattcatgcctgtaatccagctttttgggaggcagaggcagggggatcgcttgggcccaagagttcgagtgagctatgattgcgccactgcactccagcctgagcaacagaataagaccccatgtcaaataaacaaacaaaaactgccacaaagattataaaataataatcacaatcacagtaatacctaccatttatctaccttaatttttttttctttgagacagagtttcgctcctgttgcccaggctggagtgcaatggcaagatctcggctcactgtaacttccgcctcccaggttcaagtgattttcctgcctcagcctcccaaacagctgggattacaggcgcccaccaccacgccctgctaatttttgtagttttaatagagatagggtttcaccatgttggccaggctggttttgaactcctgacctcaggtgatccacctgcctcagcctcccaaagtgctgggattacaggcatgagccaccgagcctggcctctctaccttaaatttaaacacatgaagttttttttaactcacttggcgaaaggaaccaggaaggaagctgaaatatctgtgtataacttaatggtacattaagataaaagcttgattcacgaattcattcaaaaaaactttttgaggccgggcatggtggctcaagcctataatcccagcactttgggaggcaggaggatggcttgaggccagaagttggaaataagcctgggcaacagagtcagaccccatctctacaaaaaagcagacaacaacaacaaaaacaaaaaccttttgaacacctattatgggttaagcatactgattctctcaggtaggactctgagtatgcagtatagaaaactagctcaaattggattaaggcaaatgggaatttattggctcgtggaatggaggaccagtttcaggagaggcctaactcagggctcaacaatgtgaaggggaaatggatttttctgtttcttggctgactgctcttctctgtgtgctggtttctttctcaggctccgagcagttggtcgaagtagcagctctcgactcagcctctgaggctcaagttcaatgagagggagcgagagagaaatcgttctagggagctgcagcaagacctaggatccaacgagtggaccatcttagatggccccatttctgaggtgcccatttctgaaccagtcccagtggccaggggtataagcatgttctgattggcttaggcttggacacatgttccacctctagagctgagttggctttatctggagtacagggactgaaagtggggaacagaagtctccccagagcaaaataggagtactctaagatgtggttgcaaatcagcacaccccacctatctctgtttgactactatttatgcrttctcagcagacataaatgtgttaagagtagtagatcggccgggtgcagtggctcacgcctgtaatcccagcactttgggaggccgaggcaggtggatcacctgaggtcaggagttcaagaccagcctgaccaatrtggtgaaaccctgtctctactaaaaatacaaaaattagccrggcaatgtggcatggacttgtaatcccagctactctggaggctgaggcaagagaattgcttgaaaccgggaggcagaggttgcagtgagcccagatcatgccattgcactccagcccagacgacagagcaaccctccgtctcaaaaaaaaaaaaggtagatcacaaccttctttgactaatactctatccacacccactcccctatttaaccagtgtgtcccctctaagaatctttatcctcatggttcacatggtgtattagtctgttctcacrctgctaataaagacatacccgagaccgggtaatttataaaagaagtttaattgactcacagttctacatgactagggaggcctcacaatcatggcagaaggtgaatgaagagcaaagtcaagtcttacacggcagcaggcaagagagtatgcccaggggaactcccctttataaaaccatcagatcttgtgagacttactcaccaccacaagaacagtatgggggaaaccacccccatggttcaagtatcttcacctggctccacccttgacacgtggggcttattacaactcgaggtgagatctgggtgggacacaccatatcacgtggccacaccatatcacatggctttggaacccttcagggtactgggtgcatggatatgtgtaatgttttattgcttctcttttgaggtgccacaaaatacccttctctgcttggagaygcaggctccaggaaaaggaaggagaccaacagatgagaagtgacttcttttcttccacttctaggaaaatacataattagaaccttccaagatgtaaggaaaaagggccagatttagatttccaaatgtggagtgacaagtattttacaaaatgagggagttggattagataactcactaaaggccctcctagttatcgaaggattctattattcacatcctttcttttagaacagcagtgtttgttttggtttcaataaggggagagggcatgggctcctgaagtggcagggaggaggggaagagatggagcagcgcaggcaggggcaagcggggactgtgagacaaataacacccatttcccagttttagttgtcaggcggctgctcttcactccccacttggattttgagcattttcacaaatcttcagaattagttcaaatcatcaactcgtacttggtagctttattcccttggctcttgaaagggaaagtaaatcaaagcttgtctgcccagaacctggcaggagcatttaataaagatgttcagcttggcgcagtggctcatgcctgtaatcccagcactttgggaggccgaggcgggyggatcacttgaggtcaggagtttcagaccagcctgaccaacatggtgaaaccccatctytactaaaactacaaaaattagccgggcatggtggcgggcacgtgtaatcccagctactcaggaggctgaggcaagagaattgcatgaacctgggaggtggaggttgcagtgagcccagatcatgccactgcactccagcctgggtgacaagagggagactgtytcaaaaaaaaaaaaaaaaaaaaaaaaaaagatggtcatggtcatcccagggtgggggcaggcttgaggactctgcggtggtctctcaggatctactccagatccaggctggcttccagaaatactgcaagtggtaagaatgccaagatttcccagctctgttgcagaatgaattagtggccctcaagtgaagtcactgcagaacaaaaggctataaaaagagagaaaagaatgagggggagatgttataggtgcaaactggcatggaaagccctgcaacgcaagcaagcaagatgtttgaattctcccaagagaggcagacaaagcaacacaggaaaacatttagacatccatgaaggcagagagaatcctgaagcggaagtctgtcagtgagcagcatttcagtgctgagccaaagacagggaattggccaaagcaccaggaaagagagctgcaggccctcagtagctggtcaaccaatatgggttgaaacgaagtctggtttcagcatttgtgctgatgttgcctcattttacgttttttagtttttgttttgagacagagttttgctcttgtggcccaggctggagtgcaatggtgcaatctcagctcactgcaacctccacactgccccgccgccaggttcaagtgattctcctgcctcagcctccctagtagctgggattatagacacgcaccaccatgcccggctaattttgtatttttagtagagacggggttttaccacgttggccaggctggtcttgaactcctgacctcaggtgatccagccgcctcggcctcccaaagtgctaggattacaggtatgagccaccgcgcctggcccattttacattttatttctcattgatcacttgcaggtcagagagtcacacaagctacagtcccaagcacctatgttctaaacggtgcagcttggcaagggagtcacaaataaacatgcccctttccccagtttcctcttccaaatagtcctgaccctctatgtaaggacccagaagtgcctcaagtcgtgttaaagcctacatttcactcttttatctgaaatacaatttgagaaataggaaatgcatgatttgtaacctgacaaagttgaattttacctgagccttgtgggcctggtgaacagtgaaggttaagaaatcccccacccagatcacaaggtcgggagatcaagaccatcctggctaacacagtgaaaacccgtctctactaacaatacaaaaaaaaattagccgggcgtggtggcgggaacctgtagtcccagctactcgggaggctgaggcaggagaatggcgtgaacccgggaggcggagcttgcagcgagccgagatcgcgccactgcactccagcctgggtgacagagcgagactccatctcaaaaaaaaaaaaaagaaaaatcccctacccgggctgggcatggtggctcacgcctgtaatcccagcactttgggaggccgaggtgagaggatcacctgaggtcaggagttcgagaccagccatgaccaacatggtgaaaccctgtctctactaaaaatacaaaaaaaattagccgktgtggtggcaggcacctgtagtcccagctactcaggatactgagacagaagaatcgttggaacccagaaggcggaggttgcagtgagccgagatcaggccactgcactctagcctggcaacagagcaagactcagtctcaaaaaaaaaaaaaaaaaaagaaaaagaaagaaagaaagaaagaaagaaagaaagaaagaaagaaagaaaatcccccacccttcatgttctgcaaaagggcttactgcaaagaccaccccccaacccttccasatgtcacttcagtaagactcacagatgctcttcttctttacctatgttaagaccagacacagaccctcaaaatttcctttctttgcctcacagatgattagctgaactgcttgtcctcactgaagaactagagcaaaatacatgttacccaaactttggttaggcttctctccttcctcagagcctcagaactttgtttacccttggcctgagccccttcagagaacagggtggcttcagggccaaacattccaatttgctcgatttgttactctttcatctgcttcccayatctggttcatcctagccttgtttcctcctaccatagagaaaccctttgcaacctttgagatgtttacagaccttccagtcccagcattcccctccctccattgcaggagtacccccgcaaygccctggcaataattccttcgaatgaaggtctctcttttaccacatccagaattttttttatttgacaaaccagaaatggaagacaacccatcagctcgtcttctgagctccttctagcgccaggaattccatagaaaccrcatattgtttgattcctcagcccccrgatgggttgccagagtgcagtgggacttgccaagagaatgtgacctctgacaaacaatgatatgggtagagagcctaagttaaatgcttatcatgtgctaggtactattttatgtgttttatgtttgttrtcacatttaattttcccaatttccataagaggaaagtattatttttagccctgtcttataagacaggaaacagaggctctcagttaaattagtcaaggtcacacagccagtgagtgacagagctgggacgcaaatgcaggtcagtctgaggccatggttgggcttgtaatcaccatgctatgggctttcctaagaggcggcttcttggaaatgctcctttcggtgtctggtatctctggatagaagcgtgtgaaaaagaaactgtcagctgggaattagccaagcacaacagccagagtatggtgtccacctgccgaacactgagggaaaccaaaatatttctccccaaaatattgaggattgttagttgaagacactaaaccgcaggggaccgctgtgcctcagcctctgtgtgcctgatggcggggcataaatccttccttattggagacagcacttgctttttggcccagagaaggcaccagcaggcaccagcggaaactgggaacagattttactctcttcccacatgtattagtcaggattctcttagagggacagaactaataggaaagagatagatagatagatagatagatagatagatagatagatagatagatagatagatgcatacatacatacatacatacgtagatagatacatagatacatggatagatagagataaagggaagtttattaagtattaagttacacagtcacaaactcccacaataggctgtctgcaagctgaggagcaaggagagccagtccaagtcccaaaaatgaagaacttggagtctgatgttcaaaggcaggaagcatccagcacggaagaaagatgtaggctgggaggccaggcctgtcacacctcttcatggtttctgcctgctttatattcattggcagctgattagattgtgcccactagattaagggtggatctgccttccccagcccagactcaaatgttaatctcttttggcaacacctacacggacacacccaggatcaatactttgtatccttcaatccaagcaagttgacactcagtattaaccatcacaccatatttttccgcctttgaaaagactggaactgctctctctttcatcttgtcactatgtaggatttatggctctttgttaaactatgatttaagcaaagcccctaagccactgccttgagagagaaatacttttgaactgaggcctctcccgtgtgatgggtactgcatgcattaataaatttctgctttttttttttttttgttaatctaacttttgttttcaggagagtatctcaactaaaaacctaaaaaagaaaaggaaaaaatatgttttctcccccacaatgtgcacctgccaaacagaccatttcacagcaaagcaatgcgtaacacaatggagtgaaacaaagaagagaccagtgtgtaatcatgcccatgccctcagcacagacagaaacaagtgcacgtactgtgtaaactacagaagcgaccaaacacctccctttcctggctactataagcagctgaggcttctttatcaatgaggttttgagtggggcttggttcctgccactttctaaataaaaatcattaagatactcaatcaccaaattgcccacactatctgactgcacccagtccagagcaggcctcgctcggctsagcccttccccaagtcatctaacataaactcaaatcctactataagcccctcctaatggcctcttacctagaccacacttccctagggtgtgtaaacccaaatcataaagctgactctcgctgcagatgaactaagggactggtgagcttcaacacaagcttggccccatctgcgcacctgaacgcaatgctttcccatgcgtctccccgtggatacatcccgtaatggagggtgctctgacttcagctggttcgggaaaggccactcctgggattgcttcctcttttctgcccagcatttcttcttcttcttyttttttttttttttgagacggagcctcactctgtcgcccacgctggagtgcagtggcgcsatctcagctcactgcaacctctgcctcccgggttcaagattctcctacctcagcctcccgagtagctgggactacaggcatgtgccaccacrcccggctagttttttgtatttagtagacatggggtttcaccatgttggtcaggctggtctcaaactcctgacctcaggtgatccacctgcctcggcctcccaaactgctgagattataggtgtgagccaccacacccagccttytttcttctttactctcccaactcctccactgcaactcccattctacagagaaggcattatctcctttgggctaatgttttaccatactgaaaagacctctctaagttagtcctcttcacctcagtttcccagctgggaaagctcaagcccaggcattgtaggtccctgtggctttacgtacacctgaaagtggcagggacgggtcagcagagaccctgatcctaccattaggttctgaatgggaaaaggaactacagaagcatctccaccaaagctcttcttsccaaagtttacttctgtattgtttaggccttggaggtaaaggataaaattgtccagacagytaattattttcttcaggtggctgaggtaggaggatagcttgagtccaggaagtcraggctgccatgagctatgattgcaccactgccctccagcctgggagacaaagcaagactctttctctaaaaamagaggwaaaaaaaaaaaaaggaacgagattgtgtcctttgcagggacatggatggagttggaagctgttatcctcagcaaactaacacaggaacagaaaaccaaacaccgtatattctcgattataagcgagagctgtacgatgagaacacatggacacatgggggaaacaacacactggggcctgtcgggggatgggaggagggagcgcatcagggagaatagctaatggatgctgggcttcatacctaggtgatgggatgatctgtgcaggaaagcaacatggcacacatttacctatgtaacaaacctgcacatcctgcacatgtaccccagaactttaaagtcgaaaaaaaagaggccgggcgtggctgttcagacctgtaatcctagcactttgggaggccaaggagggcagatcacttgaggtcaggagtttgagaccagcctggccagcatggtgaaaccccatctctattaaaaacacgaaaattagccaggcatggtggcaggcgcctgtaatcccagctactcaggaggctgaggtaggagaattgcttgaacctgggaggtggaggctgcagtgagccaagatcgtgccactgcactccagcctgggcaacagagcaaaattccrtctcaaaacaaaatcaaaaacacataccatcacaccggagattagggcttcaacagagaaattttgaaggaacacaattcagtccatagcaagtagtacagtggtttttaaaaatttttatttttaattcaaatgtaataattgtacatatttatagggtacaatgtgatgttttgatacatgtatatattgcgtaatgacaaaatcagggtaactagtacactcaccacctcaaagattaatttttttttgtggtgggaacatacaaaatcctctcctctagctattttgagatatacaataccttattgttggctacagccaccctactgtgcaatgggatgygagaatttattcttccttgttaattttaactttaaaagtttatttttggccgggcacggtggctcacgcctgtaatcccagcactttgggaggccaaggcaggtggatcacctgagrtcaggagttcgagaacagcctggccaacatggtgaaactccrtctctattaaaaatacaaaaaaattagtcaggcatggtggcaggcacctgtaatcccagctacttgggaggctgaggcatgagaattgcttgaacctgggcggcagagtttggcagtgagccgagatcacgccactgcactgcagccttcacgacagagcgagactctgtctcaataaaaagaaaacaaaaagtttatttttgttgtaacattcttttattatttctagaggcatgtaacaatgtgctatgtaacaattcaagactgtggcccagatgaaataatgatagcagcacatatctggaacttctttggtcacatgaatgcataataaatatatgaagtggaaactcaattctacgtagtatgactacagcagactaaagacaataatcaggccgggtgtggtggctcacacctgtaatcccagcacttcagcactttaggaggccaagaccagcagattgcttgagctcaggagttccagaccagcctgggcaacatggcaaaacccyatctctacaaaaaawacaaaaattagctaggcatgctgatgtgcgcctataatgccagttactttggaggctgaagtgggagggaggtggagaccatagggagcagagatcacgccactacactccagcttgggtgacagagtgagaccatgtctcaaaaaaaaaaaaaatgcaatgaccaccaaaaactactctctgcagtaacatggcaatgaaaatagatgccattgttatgtactttaacttctactatgattatttgacatgagattcctttcctttgctttcctttttttttctttttccttttcctttcctttcttttcctttctttttttggagacagggtgggtctcactctgttgcccaggctggagtgcartggtgcaatcttagctcactgcaacctctgccttcctggctcaaatgatcctcttgtgcctcccgagtagctgggactacaggtgcccactaccatgttcagtgattttttttttcctgcagtttttgtagacagggtttcataatgttccccatgctggagatttctttctttctttttttgaaaaacaaaaaacaaaaaaacaaagtcttgctgtcgcctaggctggagtgcaacggcacaatcttggctcacttcaacctctgcctcccaggttcaagcgattctcctgcctcagcctcccgagtagctgggattacaggcttcgtgccaccccgcctggctgatttttgtatttttagtagagatggggcttcaccatgttggccaggctggtctcaaactcctaacctcaggtgatccacccrcctcggcctcccaaagtgctgggattacaggcatgagccaccatgcccagccttttaaatttattttwaaaataaacgtatttcttacagttctggaggtttgaaagtccacagytgttgggctgcatctggtgagggccttcttaccgcagcataacatgacagagagcatgacagggcaagaggccattttcttgtctgagagtttgatttagtctagaatctgaccccatcttgacataaacaccactggctcagataaatattaagtgcaacagtttacctaatttagttatttatttgtattcttttatttttattttatttattgagaggggttttgtcatgttgcccatgctggtcttgaactcctggactcaagcgatcctctcactttggcctcccaaagtgctgcgatcataggcttgaactaccgcgtccagctagtttatctaatttaaagacatcaaaatctaaagtcagattcttacttagatttggtgtttcagatttcaaagagatgagatgtcaccagataaaaactactaggtggtaaccaggcgtggtggctcacgccgtaatcccagcactttgggaggctgaggcgggcggatcacgaggtcaggagttcaagaccagcctggccaacatggtgaaaccccgtctgtactaaaaatacaaaaaaaatagctgggcatggtggcaggcacctgtaatcccagctactcgggaggctgaggcaggagaatcatttgaacccagtaggtagagattgtagtcagacgagatctcaccattgcaccccagcctgggcgacagggtgagactctatctcaaaaaaaaaaaaaaaaaaaaaaaaaacgaccaggtggctcacgcctgtaatcccagcacttcgggaggccaaggtggaccgattgcttgagctcrgaagttcaagatcagcctgggctacatagtgaaaccctgtctctaaaacaaacaaacaaacaaacaaacaaacaaacaaaaaacaaacaaacaaagcttagctgggcgtgatggcgcatgcctttagccccagctactcaagaggctgaggaggraggatcacttgagcctgggaggcwgaggctkcagtgagctatgatcgtgccactgtaccccagcctgggtgagagagtccctayctcaaaaaaataaaaccaaaaaactactggggccacgtcagaactraaagagttctgcaggcccttcagagaaaggagaagtgagagtcaattaacctcaagattacatttaaaagcattttcctctttagtatagaggtgtgttaaaaaaaaaaaaaaaagcatttatacgaggtatgttagtgaaacagcaaaaacctaattatatcctaaataactggcacgctctaggttacaaatagcaatttgtaaaagacccattgaatgaacacattaaacagcaggttgcttattccttctcaaaccgcactaaaaaattcctctctcgcatgtgtaggtcccagagccagacagttatgagatgatggtgccccctggtggccaatgtggggagccacccggccaggcgtgcttcctggctttgtgccagccatgcctttattctttggttggttggttggttggttggttagttggttggttggttggctggttgagacagagtcttgctctgtcgcccaggctggagtgcagtggcgatttcggctcactgcaacctccgtctccgaggttcaagcaattctcctgcctcagcctccggagtaggtaggactacaggcgcccaccatcaagcccggctaatttttgtatttttggtagagacgaggtttcaccatattggccaggctggtcttgaactccagacttcaagtgatccacccgcctcwgcctcccaaagkgctgggattacaggcatgggccaccgtgcccggccagaccatgmcttkacttttgcacatatgcacagtatttctgaaaatcaagtgaaaaagttggatttatatactctatgtgagtttacatgttatggggatttccatttccagagaattaaaatggataatcaaatgtttaatttcatttcacaattttcaaatatttctttccttccctccctccttcctctctttcttttttctttctctttctttctttctttcttctcttccttttttttttttcttagacagagtctcactctgtcgccccagctggagctcagtggtgcaatctcggctcactgcaacctctgcctctcrggttcaagtgattctcctgcctcagcctcctgaatagctgggactacaggcctgtgccaccatgcccagctaatttttgtatttttagtagagacagggtttcactatgttggccaggctggtcttgaacttctgacctcaggtgatccacccatctcagcctcccagagtgctaggattacaggcgtgagccactgtgccggggcagyaggcctttcttgactgcagattttctaatacatgaaaacagccaccaattgcaaaaatatattaattttcgacaggtacaaaaggcactttgtgaatatcagtatgcagttgggtacacttatccggaattaaacctgtctctcctggagctacatgccacaggcatctcacacagggrccgctgttctggaacactcctgtgagccaataaaggatcaacagcttctcttcaggccaggcgcagtggctcacacctgtaatcccagcactttgggaggccgaagggggcggatcacctgaggttaggaattagagaccaacctggccaacatggtgaaaccctgtcwmtactaaaaatacaaaaattagccaggtgtggtggcgggcgcctgtaatcccagctactcaggaagctgaggcaggagaatcacttgaacctgggaggcggaggttgcagtgagctgagatcgcaccactgcactccagcctaggaaacaggagtgagactccatcttaaaaaaaaaaaaaaaaaaaaaaagcttcttttcaagaaaaagccatccagtgaatgggtaccactcacaaaatgaagttactgtttttttttttgtttttcgttttttgagacggagtctctctctgtcgccgaggctggagtgcagcggcgcaatcttagctcactgcaagctccgcctcccgggttcacgccattctcctgcctcagtctcccgagtagctgggactacaggcgcctgccaccacacccggctaattttttttttttttttttttgtatttttagtagagacggggtttcaccatgttagccaggatggtctcgatctgctgacctcgtgatctgcccgtctcggcctcccaaagtgctgggattacaggcgtgagccaccacgcccggccttaatattaagcttgttttgctatagagttgaaactaatttgtttgcagattgggcacaaactctctccccctgcaaaaccaaattgttcggtaagccatgagttacctctttcatcgacctcaggcttattttggcatattcaataggctgatttaagcctttggagccacttctataagtagtctgtaagaaataacacaccttagctgggcgcggtggctcatgcctgtaatcccagcactttgagaggctgaggcaggcggatcatgaggccaggcgtttgagaccagccttaccaacatgaggaaaccccgtctctactaaaaatacaaaaattagccgggcgtgatggcaygtgcctgtaatcccagctactcggratgctgaggcaggagaatcccttgaacccgggaggtggaatttgaagtgagccgagattacgcgccactgcaccccagtctgggggacagagacagactccgtctccaaaaaaaaaaaaccacacacacaaaaaagaaatatcccttctccaatgcaccaaagggataccagtcactattccttttctttctacactgaagctaagaaatgcctttttcagttaatccacaaacaaatgattaacatccctactttttttttttttttgagatggagtttcgctcttgttgcccaggctggagtacagtggcgtgatctcggctcactgcaacctctgcctccccggttcaagygattctcctgcctcagcctcctgagtagctgggattacaggcatgtgccaccacgcctgggtaattttgtatttttagtagagacggggtttctccatgttggtccggcttgtctcaaactcccgacctcaggtgatccacctgccttggcctcccaataacatccctactttaggctacaycatatataatgagtttagttggttaatggctacccaaattcaagtagtaagcaaagtacctttatgccttgagaggcatgaaaacagcagcctccaggctgaaatatataacatggatggctgccacccaaccaacgcaatcaaaccctccccttaactgatcagatgtggataggacagcaaaatacatctctaagattgggtgcccattcctctccttggggatggttatgagcatgtgagtctcacagttgaccatatccaccttacagttggactggacaatacacttgrgactgtccttatctcccaggtgtccttacacatctagattccctccccaccaattgggaaacagtgacagcccgtcatagacagaaaaagtgggcttcttggtgattttattctatggctgtcttctctcctcaagcagtggctatagatgttgaattacaagtagaagccctggcaaaacacacagctgcagcttttatttatttatttttgagagggagtctcgctctgtcacccaggttgaaaagcagtggtgccatctcggctcactgcaaactccacctcccaggttagccttagcctcctgagtcgctggaacaacaagcgtgcgccaccacacctagccaatttttgtttttttagtagagacaggttttcaccacgttggccaggctggtctctaactcctgaactcaagtgatccacctgcctcaacctcccaaagtgctgggattataggtgtgagccaccaggctcagcccactgtagctttcaataatactcatcagggccagcagcggtggctcacgcctgtaatcccagcactttgggaggccgaggtgggcggatcacgaggtcaggagatcaagaccatcctggctaacatggtgaaaccccgtctctactaaaaatacaaaaaattagccaggcatggtggcgggcgcctgtagtcccagctactcgggaggctgaggcaggagaatggtgtgaacctgggaggcagagcttgcagtgggctgagaccacaccactgcactccagcctggggaacagagcgagactccgtctcaaaaaaaaaaaaatacttaccaggctatcacccttctgacagaagagacttaccaaataagacaaatggctctacaaaactgtatggctttagacattttaactgcagcccaagggggaatttttgccctgatcaaaactgaatgttgtatttatattcctgagtattcccataatgtatcccaggctatgagttccttggaaactcacattacagcattaattctctgtctcaaggccccataatggcctggtttgttagctatccagtacttggaaagcatttcttttcagcatgcttggtattgtaatactcgttattataaattgctgtgctttttacttctgttgcacttgtgtaggtttgcaagataaaatagctcagcaacttctttgcccatctatttactcatttcatattttacctttataggaactattgggacattgctcaagcaaggaaccacctggctccctgaggaggctcactgcatgctttcgtgaaaggaccctgtcccagcaatcgatgtccactatcagcaggaagaagttacagaagaatgaccttcrccctcctctcctcttaaaattaagggctctcttagctgggcatagtggcgcatgcttgtaatcccagatacttgggaggmtgaggcacgagaatcgcttgagcccgggaagcagaggctgcagtgagccaagatcgcaccaccacactctagcctgggtggcagagcgagaccctgtctcaaaaaaacaaaacaaaacaaaaagattaagggttccctcaaaattagtgggggtaatgttagggaaccaggagcctakgagggccagagtagcaccattttaagttcagctccatcttgagaaatagtaaagcccattctctgctggtcacgacccacaktcatgggctgtttacagtggaagaaacagcctaaagatacctacaaggacacactcctactacagccaagagtccagatgtccaatacccataacaatctctgttttcaagataataatagttttgctttgatgtatccacacactagaatgtcaaggccagttttctttaaatcagtagtcatacattctgtcatgctgtctgctcacccacacgtggacacagcttagcttagcctttatatagacaagatctctagagaagaaaaacaaaaaacaaagtcgaggcgttcctcctcttgctttctgaggatgccctactctaacagtgtagtttctaataacgttgyttctttcactgcactctgtgactcgttttgaagtccctcctgctcgagatccaagaacgttctcttggggtctggatagagatcccttttccggtaacacgatcattgaaggtatagaggtcccggactgctgggaatattttatatttccttttgaagactctccatcctgcccttatttcttaaagctgagttaattccattgcacataatttatttctccctcctgtatacatatcttccttttgtcctcttctgtcgcttttaataccgtgtggaggtgcaaaaccccttctagtaatggctggggaaaaaaagtcatktaagtcccagggtgaaataagactttctaaaaaaaatacttgagtctcaacctctaaaacctttcaagtaccccgatatttcttttcatcttgtcacaaatttttatattcctcttcatcctgttaaaatctcccctgtttttcttaaattaccacctttcaaggtaaataaaaygctgctggttctctttttatcagkgtgccatttaattttcggttattacaatagaatggtcttaaatttgtctttaaactgaaaacatgcaactctcaagtgataacacggcttagagaaccttttgtttgagagcctggaaactaagtgtctccattacaatgtttccgactcccaaaataaccaagagatgaggtatccttgtgccacctttataaaactcttggttgttacgtctcatgcagagacacaatatttgttgatagtttaaataataattattattaatattaatagaacattttctatgttccaggccttgctttaagaagtttataggcattgactcatttaatcctcaccacaacctatgaagtaggtacttcttgttctctcatttttcaattttattttgttttgtacttttagtagagatggggtgtcgccatgttgcccaggctggtctcraactcttgagctcaagcaatacacccacctcggcctcccaaagkgctgggattacaggtgtgagccaccgtgcccrgccttgttctctcatcttatagacaaattcaccgaagcacagagaggttacggcacttaatcaagctcacagagctagtaagtggtggaacagattgactttagagccactctgttctgccctttaacagaattcattctgtracatatggattattttgagtctcattaggcatattttgaaactactcagattcatattaaaactccatgaaggtaggaccgaagtcktattcatttttgtttctcccacaaatttttttttttttttctgagatggagtctcactctgttgcccaggctggagtgcagtggcgtgatctcagctcactgcaacctctgcctcccgggttcaagcaattctcctgcctcagcctcctgagtagctgggactacaggcacacaccaccacacagggctaatttttgtttttcgtttttgtttgtttgagacggactcttgttctgtcacccaggctggagtgcagtggtgcgatctcagctcactgtaaactctgcctcctgggttcaagcgattctcctgcctcagcctcccatgtagctgggattacaggggcatgccaccacgcccagctaatttttgtatttttagtagagacagggtttcaccattttggccagcctggtcttgaactgctgacctcaagtgatccatccacctcggcctcccaaagtgctgggattataagcgtgagccaccgcacctggacaatttttatattttttctagtagagacggagtttcatcatgttggccaggctggtttcgaactcctgacctcaagtgatccgcctgcgtcggcctcccaaagtgctgagattacaggcatgagacaccgcacctggccccctagcaggttcttgatagttgctgacaatggagctagctggggattctttcctccgatggtcattatgcattatagacaaggttyctgtgttctcawtatgcccccaaggaacatgcttcagcaaacgtgaaaaatgccagagccatacattttttttttttttttttgagacagggtctccctctgtcacccagcctggagtgcagtggcatgatcacagctcactgcacattcatctgcccaagcccaagtgagcctcacacctcagcccccaagtaggtgggattacaggtgcactccaccacaccyrgctaatttttgtatttttttgtagagttggggtttcgctatgttgcycaggctagcctcaaactcctgggctcaagcaatcctcccgcctcggcttcccaaactgctgagattataggcgtgcaccaccatgcccagcccagagccatacatgttggtttaaccaaaagagctgaagggtggcttggagcactggcataaatgatgtccctttagctgtcagggctgaccgggagggaaacaaccctgcaacccgtaatggtccttggcttgatcaaagagcaccttgtacttgaggtaccctctttgtcctggtcccatccattcaccagcagccttcacacatctgtcctaaaaccttagattttacctatctgttgctgcacatacagcggtgccaggggacactgtcgaccacgcccggttaattttttgtatttttagtagagatggggtttcatcatgttggccaggctgttctcaaactcctgaccccaggtgatccacctccttcagcctcccaaagtgttcggattacaggcgtgagacaccacgcccrggctcaratgttcatctctttcagaaataccctcagaggaacacccagaggaatgtttgactaactgtctgaacacattgcaacccagtcaagctgacacatagaattaaccctcacagaaccaataaggaagtggaagaaagtgcttcttttgctacaggatgaggtgggagcaggaattgtgagaggccccctggccaccatctccagtgtattgggttcagctcatttcctccccrgcactgctactaatgttcaaggcattatttgttgaagccaggtgccgtctaagcaggctgtygagggagagcaattttttttttgagacaggatctctttctgttgcccaggctggagtgcagtgacatgatcttggctcaccgcagcctcgacctcccaagtagctggaaccacaagtgatcctcaggtaatcaggtgattctttcacctcagcctcttgagtagctgggaccacaagtgtgtgccaccacacctggctaattttctttctttttaatagagatagggtcaccctatgtggcccaggctggtctcaaactcctgggctcaagtgatcctcttgccttaggatcccgaagtgctggactacaggcgtgagccactgtggctggccttttttttttttttttttttttttaaggagagcaattttggtaactagagactgctgggaaagagaatgtgggcgatcagagagtgcaagggacatagaaggaagtctttagaacttggatgggagtccaagttctgccacttccaggcctttgtgcattcagccagttacttaagctgtttggcctcagtgtccatatattgcattaacaccgggaataacaatttttaccttacaagattgttaagggaattaaatgagatcatgtgaataaagagcctgccatagagttgcactcaataaacactattttacttccccctgaattccctacctgtacttttggcacatgaaaaaataattaggtagaaataggctggagtccagcaggggaagacaaactaatctttcctggactacatttttacatggataaaaatttttgccactgcaactctaagcagcactcagtatctttgagatattagtgatgtttttctctgatgttcttttagctcctggggtcactgtgggctaagagaggtggagacaggctttgtgcaacgctgccttgtccccctgctcagaggcagatgtgacttaataggaagaatcctagaggccttcagatgctgtagagaagattcatgtttgatgagagagagcctggatgacatgaaagttgttgtttttttccagagaaaaggaaagagacataacattccccctacccgcccaagcatcagcttcctcttctgaactggttgctgtggagattaaaaactttgtacacagcacattgcacacaggcgatacgcggttgttagaatctcattaccattgacaatggctaattatagatgtgaacatctaaatgtgtctgaaggggacagagaagtttggtaaggataacttacaatctttccatcttttgttttgttttgttttgttttgttgtgttttagagagggtcttgcaatgtcgcccaggctggagtgcagtggcatgatcttggctcactgcagcctccacctcccgggttcaaataattttcaaatctctgcctccaaagtagctgggattacaggcacatgacaccacgcccagctcatttttgtatttttagtagagatggggtttcaccatgttggccaggctggtcttgacctcctgatgtcacgtggtctgcccaccctgtcctcccaaagtgctgggattacaggcgtgagccacttcgcccagcctttttttgtttcgttttgtttcttagagacagcatcttgctctgtccttcaagctaaagtgcagtggcttgaacatggctactgcagcatcaacctcctgggctcaggtgatcctcctgcctcagcctcctgagtagctgggatgacaggtgtgcaccaccatgctcagctagttcttacaatttttgtagagaccaggtttcattatgttgcccaggctggaattttcgtattttttgtcacaaagcctcgctatgttgcccaggctggtttcaaactcctggcttcaaacagtcctcacaccttagcctcccwaaggatcttgtgctgagattacaggcatgatcctccatctttttatattgtgtaattataatgcagagtagtttgagcttggtgatgagaaagctttcttttcgccttcctgccactcaytgtttgtatactttattttcaaaggccattaacatgtcgacagccactgagctgctgtttttgttttattgttcccttgaccacacaccaaccaaccatgactcccaattaatattcttaatggaatccaagcctctaagcctcacagtccaggccctccaccagcctgcctcaccctatcctcatttcatctcccgcaacctggctccggtgagtgctcttcgtagtcagactgggctgtttattttctgcaatgaacttgtaaatccctgcctttggctcgtgcttgaaatagcttcctctttctcattaccgagtctacgtcctgtgtttaagtgcagctctggaaccagacgacatgtgtgtcatcccaactctactgccagctatttatgagccctcaggcaagttactgaaccttcctgtgacttcacttctttacctctaaaacagaggtcataatagtatacctacatcctatgcttattttgaagcttaaagaggtaatttaggggctgggcgcgtgtaatcccagcactttgtgggactgaggcgggtggatcacctgaggtcaggagttcgagatcagcctggccaacatggcaaaaccccgtctctactaaaaatacaaaaattagccaggtgtggtggcaggtgcctgtaatcccagctactcgggaagctgggacaggagaatcacgtgaacccgggaggcgaaggttgcagtgagccaagatcacgccactgcactccagccttggtgacagagggagactccatctcaaaacaaaaccaaagaaaacaaacaaacaaaaaaaaaacaagtgttgataagaatgtggagaaattggaaccttcataaattgctggtgagaatgtaaaattgtgcagtcactttggaagacagtctggcaattcctaaataatttgagcatagagttactatatcacccagcacttccattcctaggtatatacccaagtgaattgaaagcatatgtctccacataaatgtgtacattaatgtttatagtggcattattcataatagccagaaagtggaaaccaccttaatgtttatcacagatgaatggagaaacacaatatagtactgaatattcacataatggaatattatttagccacaaaaggaatgtagtacaattgtccttcagtatccacaggggattcgtttcaggacccctgaggatatcaaaatccatggatgcttgagttccttatataaaatgatgtagtatttgcataattactttaaatcatctgtagattataatgttgaatatgatgtaaatagtttttttttttttttttgagatggagtctcgctcttttgcccaggctggagtgcaatggcaccatctcagttgactgcaacctccgcctcccaggttcaagcgattctcctgcctcagcctcctgagtagccgggattataggcatggaccaccatgcccagctaatttttatatttttagtagagatgggtttcttttttttttttttttttttttttgagacggagtctcgctgtctcccaggctggagttcagtggcgcaatctcggctcactgcaagctctgcctcccgggttctagccattctcctgcctcagcctcccaggtagctggggctacaggggcccaccaccacgcctggctaagtttttgtatttttagtagagacagggtttcaccatgttagccaggatggtctcgatctcctgaccttgtgatctgcccaccttggcctcccaaagtgctgggattacaggcgtgagccaccacgcccagccctgtgacggggtttcaccatgttggtcaggctggtcctgaactcctgaccttgtgatccgcctgcctcagcctcccaaagtgctgggattacaggcatgagccaccacgcccgaccaatagttgtattttttttggagacggagtctcgctttgtcacctaggctggagtgcagtggcgtgcaattggctcatgccaacctctgcctcagcctcccaagtagctgggattacaggcgcccaccaccatgccgggctaatgttttgtattttagtagagacggggtttcaccgtgttgcccaggctggagatagttgttatatttttaggaaataatgacaagaaaaaaaagtctatacatgctgttyagtacagatacaaatttttttccccaattttttcaatctgcggttggttgaatctacggatgtgaaacctacagatacagaggtctgactgtacttattcattctacaacatgaatgaagaaaacattatgctcaatgaaagagtcagtcacaaaggactgcatatgattccactcacaggcatccctccttttactgtgcttggctttattgtgcctcacagatattgtgaattttacaaattgaacgtttgtggtacccctgtgtcgggctagtctattggtgccatttttttttcaaacagagtgtgcttacttcgtgtttctgtgtcacattttggtaatcctcacagtatttaaatttttttcattaatattaaaagtaatggccaaaacaacaattacttttgcaccaacctaatatgattatctgttctggtgatctgtgatcatagatctttgatgtttctattgtaattgttttggagcacccatgaaagatggtgaacttaatggataaatgtgtgtgttcttttccttttcttttttttttttgagacagaatctctctccgtagcgaagtacaatggcatgatctcagcttactgcaacctccacctcccaagttcaagcaattctcctgcctcagccccctgagtagctgggattacaggcacgtaccaccacacccagctaatttatgtatttttagtagaggtggggttttgccatattggccaggttggtctcgaactcctggcctcaagtgatccacctgcctcccaaagtgctgggattacaggcatgagccactgcactcagccctgctgtcagaggcctttgtaccagagcaactccatctcgaataggggctggttaacctgaggctgaaacctgctgggctacatttccagtaagttaaggtattcttagtcacagaatgagataggaggtcgctgtaaagactttgctgatcaaacaggttgcagtaaggaagccaaccaaaacccaccaaaaccaagatggcaacgagagtgatctccagtcgtcctcactgctacactcccaccagtgccatgacagtttacaaatgctgtggcaacatcaggaagttaccctatatagtctcaaaggggaggcataaataatccacccgttgtttagcatatatcatcaagaaataaccataaaaaatgggcaacaagcaacccttggggctgctctgtctttggagtagccattcttttatttctttactttcttaaacttgctttcactttatggacttgccctgatttctttcttgcgtgagatccaagaaccctctcttgggatctgaatcgtgatccctttccagtaacactaagagggttttgagtggaagattgaaatgacctgacctttttttttttttttaaagaatcactctggcttttctgttgagaagagaccaaaggaagcaaggagggataaggaggttagttcaaagacctttgcaatgaaagagttaaggacgtgccacccccaaatatgccagtttggcatactgattatttcaagctgaaggtacttgagagactgtcattgcaggaagagctagctcactgtttcacagtggacagggtctatgcaaacctgcggccaaggaagctgagaggtggaagaaagaggctgacacatccagtttcttaggaagaaacrtttactagggacttagaacagaagccatgtctgtatctcaggaagcagtgagacaagatggtggatccccgcaccattacccctcaaacccagggcttatataccccaggagaggagtgattcagaagggacgtggagaacaacttaagtatgataacatcaaggccacttgacctaagggcaggatttacagtcagtacgtgctcttacacaaggaacaatagataaactggaagtcttacaagacttcctggaactggcgttaatcagaaaccagcatggattagcatccaggatggagttgctttgccctccccactgacgtgtccattcctacctttaggaagccataaaaattcctttgagaaagatgccttcccttttttttttttttcttttttgagacggagtcttgctctgtcgtccaggctggagtgcagtggcgcaatctcggctcactgcaacctccacctcccgggttgcagtgaggcaacccgggttcaagcaattctctagcctcagcctcccgaatagcagggattacaggtgcgtgccaccacgcatggctaatttttgtatttttagtagagacggggttttaccacgttggccaggctggtctggaactcctgacctcaggtgtgatctagccgcctccgcctcccaaagtgctgagattacagacatgggccaccgcgcccggccgatgccttcctttagtagaaagagaaaataacccttatctccagagactgggaattgatgctacaatggacctatacagataaacttactaaacgaacacttacctttcactagctttgcacttcactgatacaggagtttagaagaaatcacttaggcagatagtaggagtatgggaatcctcagtaaggcttttccttttcatgaaaagcagccccaaatcattttctaacaaagagcattctgtaaagccgagctgcagacacagacaagcaagctgggagcttgcacgagtgaacgcagggaggaacttcggagtacacatgttcaaattggaggctccatcttcccttccctttgtcagccacgtgtactgtaaggagcagacaagatggtgttgatcaactagaaagtctatttccataataagattagggtggggtaaccaggcttcccctgcgcacagtgtaaacgtcatacctgatcaaaccaatctatgagccctatgtaaatcagacaccgtctcctcagacctgactataaacttcggcgcatccactgccggctggtcctttccactcgcagatccatttctctatagagaaagctgtttctctttcccttctcttctgcctattaaacctctgctcctacactccttgtgtgtgtcagtgtcctaaattttcctggcgcctgacgacaaaccccgggtttataccgcagacagtggtatggtcccttcatcaccatatatctcctagtgattcccccgcaatttactgcccctagtccaaatccctttgtcttatcatttcttcataaatttatcatttctttgtccaaaaggtataaaagctttctgttctggccattttcttcaggtcgtcgcccctttcatcttgtgagagtcttcatgtgcaagtaaaaattagtaacacttgtatgcttttctgttaatctggtttatgtccatttaattcttagacttagctttagacgatcccaagggagtagaggagaatttatcctcccatcagcaataatccaggctagagatgatggtgatttatattagaggaaagcaatgcaggtggtgaaaagtggtcagattctgcatagacagtgttttggatttgctagtgggttagttgtggagtgtgcacgtgtgtgtgagagaaagattgagagagaatgtgttatagattataccaaatctttcttaagctttaagcctgaactatttatgaccaatgataagtatttccatcatatcttacaactaaagaaatgtgccaggccgggcgcggtggctcatgcctgtaatcccagcactttgggaggccgaggccggcggattgcctgagctcaggagttcggaaccagcctgggcaacacggtgaaatctcgtctgtactaaaatacaaaaaatcagccggccttggcggcatgcgcctgtagtcccagctactcaggagcctgaggcaggagaatcgcttgaacccaggaggcagaggttgcagtgagctgagatcgtgccactgcactccagcctgggctatgcagcgagactccgtctcaaaaaaaaaaaaaaaaaaaggtaccagtgtgtagtaacattgtgggtgagaatctttgctctttatacataactgtttaagtttcagttttgtttttgcttttactgttttagctgaagcacacttggccgatgttaagctaaattatcagtagatggcaccacagtcttagttagctgaagatttctgggttttgcagggagtgaggattctagtgtcagttgtcggatgtttaggtgtgactcagtgacctatgcttaaaagtttgcccggttactaactgagggagcaacaagtacaaactgcagatagggaattgaaaaaaggaaacacacaaatttacacagacacggtgcccatagatttgttgcaagggcagtttggtagagagaagctagaaggaagctgaagctccagaaaacccaaaactacaaacttccttcaaaagtctagggagaggccgggtgcggtggctcaggcctgtaatcccagcactttgggaggccgaagtgggtggatcacttgaggccagaagtttgagaccagcctggccaacatggcgaaacctgtctctactgaaaatacaaaaaattagctgggtgtggtggcgggtgcctgtaatcccagctattggggaggctgaggtgggagaatcacttgaacctgggaggcagaggttgcagtgagctgagatagcgctactgcactccatcctgggtgacagagtgaaactctgtctcaaaaaaaataaagaagacaaataatagcaagtgttggctaggatgtggagcaattggagatctcatacaatgatggtggaaatgtaaaatgacacaactattttgttttattttatttctgagacagagcctcaccctgtcgtccaggctggagtgtggttgcacgatctcagctcactgcaacctccacctcccgggttcaagtgattcttctgtctcagcctcctgagtaactgggattacaggcacacgccaccatgtccgactaatttttgtatttttagtagagacacggtttcaccatgttggccaggctgttcttgaactcctgacctcaggtgatcctcccaccttggcctcccaaagtgctgggattacaggcatgagccatggtgcccagcaggcacaaccattttagaaaaagtttgcagttaatcatacacctactatatgatctagccactgcactcctaggtatttatgcaaaggaaagaaagcctaagtctgtacaaagacttgtacacaaatgttcaaaacagctttatttgtaatagtaaaagaaagaaagaactcaaatgttcatcaacatgtaaatggataaacatgggagcttatctatatgtacaatgaaacactacttagcaatataaaggaatgaattattgatgcaggaaacatggatgaataaaaataattactaatgaaagaaataagacaaaaaccgtataaactctatacaattgcatgcatatgaaaatctagaaaaagcaaagtaatctgtagcgacagaaagccaagaatggttgtggtagaagggagaaggactggacgggtgccgtggctcatgcctgtaaacccagcacttcgggaggctgaggtgggcagatcacttgaggtcaggaattagagaccagcctggctaacatggtgaaacgctgtctctactaaaaatataaaaattagccaggtgtggtggttcacgcctgtaatcccaggtactcgggaggctgaggcatgagaattgcttgaacccgggaggagaaggttgcagtgagccaagatcgcgccactgcactccagcctgggcgacagagtgagactctgtctcatgaaacaaacaaacaaamaaaaaaacagaacaaaaagataaaaaaaaaaaagtaggggaagaactggagggaggaattacacaggagcactgaatatattcactatcttgattttggtgatggtttcatgagtatatactgtaaaggaacataaaaactctcaaaacccccaaactcattatgccaaagggaaaattaagcctgcttacttcacaaccttgtgtcaaagcgctatacattagccagatccctacaaaaggaaaaggtctcaggcatttccagataactgccctcacaaatcgcgcctaagaaaattctttcctggctcctaaacctttcaaggtgtataataaatcttcccataaacaaggacatgtcaactgtcactttaagtctgtgacttaagtctaactccttgtccaggaacctaaagtctggtaaatttcacaccgactgtgtcaattataagccttatcttcccaagtgcaaaaacaaagatgacatccattattcttctacctatcctgagaagtctgaataatgaattcttcctttactccctattttcgaatgtttgccttatctcatgtatagcatagatgtactgggcactaattaaaatctcacaagaatgtcatcatttgcttcacgcctatctcccttttcctgcatgtcttttctcttaaagaaatgtgtaaataccgagtctcctgaagcctttcccaaggagcacgggccacagactcatgtttctgtgactcagggttttcctgggcacacctttaagctctggctcaataaacctggattgattgagattcttgcctcagtctctcatttgggttgacaatacatatgtcaggacattagactgtactctgtaaacatgcaaagttgccaatgtgaagtcaaatatacctcaataaagctgttaaaagtaaattttttaaatgagatactgatatgtaatgtttgttattttactcatgtatttatttgccttttctttcatttaacagagtttattgagtgtctgtgccagaggctaaaagaggtatgacatggtctgctttcaagtctaggcagtgacggttctgcttgatatgcttgttgtacatgcccataggaagctaagaaaataggaagattagcgtgtaggctggcatgttggggaaggcttttcagaggaccttaacgttgaactgagttctgaaggacgagtaggtggtttggacagtgaggagcggttagcagtggcagctttctgtcttcaacaaggcctagggatgagagaacaaggcgctgtgggaggaaaacaaattgcagcagagaggggagaagaggagtgttttgaaaagaggcaggataggttaagtcgggactgatcagcatgggccaggaaagctgtggtcaggaatccggctgtaccattgaaggtctggggagctagagcaggttttaagcaagggagaacacagatagcctgctgatgaacagcacaggccaatcgagtggagcaagagaaaccatcttgcccttagattggctagcattacggttaaacgagtgtatttaattagtctccaagtcctgctaatagctcatccttaatcattttcaaatgttccaattctttccatccctatcgcagttaccttagttctgtctccattattgtttgcttggattaccataatatcctccaatggcggtttccttgtcttcagtcttgccccgcctttaactctttgctacctgcagcataaaacatttttctaaaattcaagtttgatcctctcacctttaactgaaaacctgatctgctgctcatcaacactatctctgtgtttctaataatgatcatcactgtaatagcatacttagcaagcatttactacatgccaggaactgggctaaacaagatgtgcttttatcttattaaatcttcctaaaacattattactatcatcactattttacagatgaagaaactgattattaagaaggtttagcaatgtgtccaagatcatacagttaataagtgtaattgaataacttgttgaaaaaccaaaaaacccttaaagacaaagttgtgtagggaatagaattttttacttgcacctgcaagagggaccgattattagagaactggctttgtaaacaaaaatgtagggcaggtatttaaagtaaaaaaatcacaaggatagacaacagctcaaattgttatcagttcacaagtctgcttggatgtatgtgggtcaattttgttaaaatctagacggtcctttctattaagacattacaatgcatcaacaccaaacaacagaaaagaaaatccatatatccctgtttttcatgctttgtctgggactaaaggaagggcaggccttttctagactatggaatctaagtttcagaaaaaaatcatttaagctgcaatataaagaataatcttggccggtcgcagtggctcacacctgtaatcccaacactttgggaggccgaggtgggcggatcacgaggtcaaaagttgggcaccagcctgaccaacatggtgaaaccccgtctctactaaaaacacaaaaattagctgggtgtggtggtgtgcgcctataatcccagctactggggaagctgaggcaggagaatggcttgaacccaggaggcagaggttacaatgagccgagatcatgccactgcactccagcctgggcgacagagcaagacttcatctcaaaaaaaaaaaaaaaaaaaaaagaatagttttaaggaaggcagaattagagatagacaagttataggaacccaggcaagccattataatgccaaactaaggcaatggcaggagggatagaaagaactggaccagttttaaatccattatgggacaggaaaggcatgttgcagtcccttcagccaagttgcaagttttgaatgagttatccaaacattattaaatgcatcttcagtgatgactaccaagcttttttccaggaaccaaccctcttttgtaaaaatgttaggttagcctgttcgttctggtttcttgggcagtgactgggatgttcaaactattaattgggatagaacaccgaagctggttaaaaacaatatttcttatagaaattgatcttgaacatggatcaaggttcactgctagcaggagaatcggagagtgtgtggtaatgaaaagttatagttgagaaaacaagcgtttacatcagcaactaattaagaaaaaagcagctcataagtggatgaatgcagttcataaacacattatatcagttattacacaggaaatctaaggcagaatactgtgaaatgcaaggtgtatagcttatcaacaagaatgtagcaaatacaccattcaactaagaaagaaatgataaggctgcatctggggctgttgactggaagcacaaagtttcctttccttgtagtagttcctaaagattccagtttacatggaaagacagaaagctgtcacacccatggcaggagcgcagaacccaagcgacaaattctaattttgaacaggcaggtgccagtgcatttctcaaactgcaaactaaaatgcagaaacacgattttcctgtttcttagttttggaccgttttcccccctctagcacgccagagcaggttttaattgttgtcaggtcagatggtgagttaactttgagtgttgagttgaggggccagtgggatgtgggtccagttgaaaggtggatatatgtagatccagactcgagtgatataggctgcaaataaattgctagtgaatttatgaattattagaaaagaaaggacattcattatgatttaatcgcrgttgaatgtaggcagcacagagggcttatactgtgtcttttttttttttttttttaaatatacggtgtctattttgctcaccactctatgcccggtgcctggaagtgcgactggcacatagtaggtgttgcatagtttcagaatgaactttttaggaatcaaaattctacaaacattgcacacagatttaacgttcccttattttccaggtgaggtcagggcgccctttggtttcgcgcttctgtccctttaagaaagtggaggagaaagaaagcgctgctgggaaaaagggcggggccgcgaggggccgccgtccgtcccgccccctgccgggccgcggcgctctgctagagcgtggctcagttttggtagcgggaccccggaaatgtaaagcatgagcgggaacagtcgccagggcgagtgacaggcgagccctatgctttacttccgagggcggtgtcagcaaagctaggtaaggagacagggaggacggtgcctgcccctttaagatcgactccaccccgcctctggaggaaaatgacgccgccgtctacccgttgtggaacgtaactcttttcatcccatcagctctccttctcattaagagaaataccaagtggtcaccacagtcacatacttcataacccatgcctcatcggtgctgggacgggagagggaagcgccgatctaaatgacatggggtccaaatcccaaataatctctatttgctctgcgttacctttaaacttaggctgcgttgtgtgattcaagtgacagcctagtactgcttaacaattagtctagtgggataccaggccctgagagacccctacgatcccaggacactgatgtggggtaactaacacccactggaagtctacgctgagttcacaggctatgtatgacctgacatgcattttgacctgccctgtgttttgatatttgaatgagttgctgatgtttacaagccgaagctggccgggcgtggtggctcgcgcctgtaatcccagcactttgggaggtcgaggcaggaggatcgcttcaggtcaggagttccagaccagtctggccaacatggcgaaacctcgtctctactaaaaaaaaaaaaaaaaaaaatacaaaaattagccgggcgtggtggcacgcccctgtaatcccaggactcgggaggctgaggtaggagaatcgcttgaacctgggagtcggaggttgcagtgagccgagatcacgccactgcactccagcctgggcaacagagactctgtctcaaaaaaaaaaaaaaaaaaaaaaaaaaaggtggaagctaatgtgtcaatatctagatttttttgatgattttgagaaatcggaggatctggcagcatgtcctgcctagcctttttgaactgtttgaaaacagtctccagcttgccacagcccctctgttattttacagccagcctgcatcactcatttatgatgtccagccccttgtggggatttggatttttgacccctaaatactttagtggatttaagaccatttaaaacatttatgcagaagagatccgaggtccccaaacaactgggtgtataagttgtgtttaagttgttcctcattctcatttattctaatccgggtgtttttctatatatatatatttttaaacaaatcttagtgatcaattgcacaggtgtttttctgttggagcaaatcttttcagtttaggcttggtaaaatcgaaccatcagatacttttacagaaagagatttaggagttgatgttcttttattacaattaaatgcatacagtatttttaaaggaaaaaacctgaatcttgattgcattgttttatgatacaacaatctttaatgaaatagagtagtcaatataatttgtattaatatatctctgcccacagacaattataaattcattaacccccagaactcttggctagacttcataaaggcaaaaactgtgtttgccctgttaactgctttatcccaccactagaatataagcttcctgaagacagaagacttctgttattttgttcacagttaccaagcatgcctactttgttaaatttatgaaagaactttaaaggtacagttggcccacaatataacaatatagcaatataaaattacaacaataaaaataacacaaaaatagtgtaacaactacttatatagcatttacgttgtattaagtattatgagtcatccagagatgatttaaagtaaagtataccacagcatatgcctagtttatatacaaatatgatgccattttatataagggacttgagtatcctctgattgtggtatcctggaagcaggggataccggaaccaatcacttgaggatactgaaggatgactgtatggctgatttcctgtaagaggcattttcttgaggattctttcaaaatcaaatgcttgtatatttgttgtgttaaattactaaaaggattctcttgtgaaaagtatcatttaaaaagattggattttcccaattgatgcaccaaagctttcatctgaaatgaacttgcacatgtgaatcatcagatacagtaatatacactgtaatattttatttcttttttttttttatgagacggagttttgctcttgttgcccaggctggaatgcaatggtgcgatctcggcacactgcaacctccgcctcccgggttcaagcaattctcaagtagtgagattacaggtacccgccaccacgcctggctaattttttgtatttttagtagagacagggtttcaccatgatggccacactggtcttgaacacctgacctcgtgatccacccgccttggcctcccaaagtgcagggattacaggcgtgagccaccgcgcccggccaatattttcttattatgtaataggatctagaaatgttgctcttcctcacaattctcagtattacttttcttttttttttcagagtcagaggttccggttgagatcaagttgggagacacacccttgttcattctccttgagaagcagctatwatcaacagaacattgacagaacctgtgtttggggaaaggactgatggctttgagtctaggttggaaagcacacaggaaccactgtggtctcctcttgcaggctctgcgaagcagtggtcttctcttgtttccctgtggccagtgtccctggagaggagctggaagctttttggaccctgagataaaggctttcctggaggagaacactgaagtcaccagcagtggtagcctcacccctgaaatccagttgmggcttttgacccccagatgcaaattctggtgggagagagctgacctgtggccccacagtgatccttactggkcaatctactggccaggaggccaagccctgtctaggtactaccctaatgaaacctttaaggcgctayagatctttgctgttttcagttccctccaacctctacaaaaaaccagagcaatgctaggcgtggtggctcatgcctgtagtctcagtactttgggaggctgaggctgtaagctgtgatcctgccactgcactctcgcctggcctgtctcaaaaacaaaacagaaacyggcaaaactcagtcttgttgttttcttttttctttctttctttyttttttttttttttggtagagacaggatcttgctatgttgtccaggctggtcttaaacatctggcctcctcaacctccccaagtgctggtattacagacatgagcctctgagcctagcctcaggttagccatattttttgttgccttgttgcgtaatttcccattctaacccaagcttatcaagctattttcccaagtaactgtctccccaagagaaatcctagagtcagctgtcaagaccctggatagctataagtgatccagaaatctcacctgttaggaggttcatagttcatagcgcatgaccattgcagagttcctagatggaagctaaacacccagtcctttcgctctcctttaattcagtgaatgtcgctccataaacctcacattccttccagagttgcttattttcccataaaacaggagctgtgagtgagtgggctgttcaaagtttccctcttctgttgggtgcagtgcctgtaatcccagtgctttaggaagccagtgcaggaggacagcttgaagtcaagagtttgagaccagcgtaggcaacatagtgatacccctatctctacaaaaaaaaaatttttttttttttgagacagagtctcactctgtcacccaggctggagtgcagtggtgtgatctcggctcactgcaagccccgcctcccgggttcacgccattctcctgcctcaccctcctgagtagctgggactacaggctcatgccaccatgcccggctaatttttgtatttttagtagagatggggtttcaccatgttgatcaggctggtctcgaacttctgacctcgtgatccgccctcctcggcctcccaaagtgctgggattacaggcgtgagccaccgcgcctggcttaattttgtatttttagtagagacagggtttcaccatgttgaccaggctggtctcgaacccctgacctcaagtgatccgccagcctcggcctcccaaagtgctgggattacaggcatgagccatcgtgcctggcagtagcagctatttagacagggcatgtatgcctctactttgccatagtgttaactggttgatgtcaagtcccaggttcttagtgccatcaacaaagaattggacatgacacatacaagtagcaaggcagcaaacagtttgttaagcagaatgcaatcagcaacgratcaggctgacctgcgagtggtatcagccccagtttgttatagttcatggccttttatatgttttttcctcacttgcttaaccttactttgtttttcgtaagtgaattgctcatcctggcctttccctcattgtgcctaaaccrcactttatttctcataagctaattgtgcatccttgcttaaccttattttatcttttctgacaaaattgctcatctttacttttagttcttgtaaccaaattgctactgcaacccctttccacttattttccttatcttgcatgttctaactcattgcttactcccgtatctcttactgcttactgtcttatttcatatgtcctgtttctgctatcttgtatgctttgcttttggtattgcttcagctagcctatgtccaacgggtccccttcacccctgacttcctctgccattctcctgcctcagtagtacccactgttccttattactccaatccgaagatcaagagtcagctgaaatttgttatttcagcgtttctccatccctcttcgcttktttggtaactatttagctccagtccaaattccttggttgaattggactttgagttttaccagagaggtcattatactacatttcaagcagcaggaaaatcactctatgatggagtcaagaggagacagtgactcttggattgagtttactaattttagtctttgttttagcagtattttgtcagtcttaattcgtggtgctcggtagtttctggaacatactaagtattcaatactttgtcagccgaaatgagagactgaggcatgagtctcaaccagtcaaggtttgttaagcccaagaaaaatgcaagtcacagaaaagtttgtggcctgtgctcttctaagaggtttttaggaggcacagtatttatacatttctttttctttctttttttttttttttttgagatggagttttgctcttgttgcccaggctggagtgcaatggcacaatcttggcagactgcagccttcccctcccgggttcaaacaattctctgcctcagcctcccgagtagctgggattacaggcatgtaccaccacgcctggctaattttgtatttttagtagagacggggtttcaccctgttggccaggctggtctcgaactcctgacctcaggtgatccacccaccttgcctcctaaagtgctgggattacaggcgtgagccaccacacctggccatttatacatttcttttctttctttctttttttttttttttgagacagagtcttactctgtcacccaggctggagtgcaatggcttgatctctactcactgcagcctctgcctcctgggttcaagcaattctcctgcctcagcctcccgagtagctgggattgcaggtgcccgccaccacacctggctaatttttgtatttttagtagagatgggatttcaccatgttggccagactggtctcgaactcctgacctcaggtgatccacctgctcagcctcccaaagtgctgggattacaggcaggagccactgtgcccagcctacaacttttttttgaaaaaaattgacttgaatagcataatcagtcagttgtgtggtactgtgcttcacacctgctgaagagaaagaccaaatgactaggtcctttcttctgccacctctgcccagctctggagatggactttttgtgtcactctagtcagaccaaacttgccaaggttggaccaagttctgctacttttcactatttcttttgtccagtcaacctaaagacatctcttttctttcttttccttttcttttcttttttctttttttgcatacctcttatttgctgagaccagctcggctggggagaccctaacccagtgacactagaggaattaaagatacacacacagaaatgtagaggtgtgaagtgggaaatcaggcgtctcacagccttcagacctgagagccccgaacagagatttacccacatgtttattaacagcaagccagtcattagcattgtttctatagatattagattaactaaaagtatcccttatgggaaatgaagggatgggctgaaataaagggatgggttgggttagttatctgcagcaggagcatgtccttaaggcacagatcgcccatgctattgtttgtggtttaagaacgcctttaagcagttctctgccctgggcaggccaggtgttccttgccctcattccggtaaacccacagccttccagcgtgggtgttatggccatcatgaacatgtcacagtgctgcagagattttgtttatagccagttttggggccagtttatggccagattttggggggcctgttcccaacatttatttttcctcatctctctgagacatgtttctcctttttaatttaggtatcttttggataatcctgatgttgtcagaggaaaatctgtattagatcttgggagtggatgtggagctacagctattgctgctaagatgagtggggcatcaaggatcttggccaatgacatagaccctagtaaggattcatattttaaaatatttaaggctcatcttttttttttctctgggataaatatgtacacatgctcagtgtggtagcttatcgttatatgtattttgtgattggacattgtgaatctctgtgcactgggacattatctgtaggaatcccctgaggtctgagtagatggtgcatttttcccaagaggatttgtgtctgccagacatccagagtaagcacttatgttaatttatgggctaggaatttcctgaaatatgtaaatagtgtttatttgaccccaaacccaagtgagtattgacctgtctttgagggttatttttattccattagaacccaggctgagacaggtaagtttttatttgatctgattttcttctggtctaccctttcactgagaatatagtccttgaaaacctttattttattttatttatttatttattttgagacagagtctccctctgtcacccaggctggagtgcagtagcacaatctcagctcactgcaagctccgcctcccgggttcacaccattctcctgcctcagcctcctgagtagctgggactataggtgcctgccaccatgcctggctaatttttttttttttgcatttttagtagagatggggtttcaccgtgttaktcaggatggtctcaatctcctgacctcgtgatctgcccgtcttggcctcccaaagtgctaggattacaggcatgagccaccgcgcctggctgaaaacctttattttataaaggagtctcagttctttttttttctttttttttttttgatacagagtctcactctattgcccaggctggagtgcagtggcacggtcttggctcactgcaacctccacctcgtgggttcaagtgattctcctgcctcagcctcccgagtagctgggattacaggcatgcaccaccatgcccagctaatttttgtatttttattagagacagggtttgaccatgttggccaggctggtcttgaactcctgacctcaggtgatccacccgcctcggcctcccaaagtactgggattataggcgtgagccactgcgcccagccaaggggtctcagttctaatttattgccatgctcaatcaagcccaagtctcgtttccctgtccacagtaaaaaaacaaaatcttttggttaatgaaatcagcaaatattcctaaaagtcccagcatttctaggtgttttgaattgtttgttttcaggatatccagtcatgtatttggaaattgtggtatagcttatattgggataacctttatacttctctactttaaaaaacaactttcatcaaaaaggaagaaaaatatattgttagcagatcttctaaattatttaatcaacatggaattataacagcctagcatataccaattcattttgtgctttttttttttttaagttgcaggaatggctattacactaaattgtgaattgaacagactgaatccttttcctattttaatccaaaacattttgaatttggaacaagataagtgggaccttgttgttcttggcgatatgttttatgatgaagaccttgcagatagtcttcatcagtggctgaagaagtgcttctggacctatagaactcgagtactgattggtgaccctgggcggccccagttcagtggacacagcattcagcatcacctgcacaaagtggtagaatattcacttttggagtctactaggcaggaaaacagtggactgacaacaagcacagtgtggggttttcagccttgagttgtcaaagtgcttccaagtatgaatatagtaatgtttggatctgactctaaaagttttctctataggagatactctccagtttaatgaaygtaattcttgttaaatggaaaatcttgtttttaaaatatgaaggtttagagttttgtttacttttgtcatgtaactggttctgtatttctatgcrtgccaattatacacatctctatctgcatttttttttctattttaaccgctgaaggaatatgattatacaatgccatactcaatggtggcagcatttaatttaagtaatggagaagaattaaacattgtagctggatctgtttctgtagtygaggacaactgtgatgtaactttgaattaaacaaacaaaacaaaacagaagaagactatatatatattttttctttttttagagacagtctcactttgctcccaggmtggaatgcagtggctattcagaggcttaatcattgggcactgcagccttgaactctgggcttttttttttttttgagatggagtctcagctctgtcgtccaggctggagtgcagtgactcatgtctcggctcactgtagcctccacctcccccaatcaagcgattgtcctgtctcagcctccagagtagctgggattttaggtgtgcaccaccatgcctggctaatttttgtatttttagtagagacggggttttgccatgttggccaggccggtctcaaactcctgacctcaggtgatccacccgccttggcctcccaaagtgctaggattacaggtgtgagccaccacgccagcctgacgatgttttttacttctatcacttccttttgattttttcttatagcttctatctctgcttacgtcacccatcattcttgcgtgttgtatgcttttcgcattagagccctttgcatgttaatcagttattttaaatttatgatctggtaattctaaaatgtctgccataactgagtctggttctgatgcttgttttcttttcagactgtttttttgtcttttagcatgccttgtaattttttgttgatagctagacatgatgtattgcataaataaacaagtaaactaaggtagcatgaggttttaaaatctgggtagggctactgtttgctgtagagtagatattacaggctaaattttcctctagtgtcctggctattgtctcctctgttatctttgagtttccctagagattccttcttatatagagtctgaagcttgcagtttttttcacctgtaattccctgttattatacagtagcctaactgatgtgataaggtatgggagaaggtatgttctatagtcctgtgattaagtctcagtcagttaagtcagcctgtgcccctgctgtgaccttcacaagtgctttcagcttttcttttgtcactttggtgagacaggaaggctagaggcagctggagttgggtgcttcctttcccccaggtcaacgaggctctggtaaaatagtttcccttgagaactggcttttgttaaggagaactgaacacttgggcatatttcaaaatggttactttccctatcctcataccagaagaggggatttttctctgatcctcaccctgagaacctggtaggtatcctggaggtaaaactatgaaagtgtggtgtctcccctaggagtgggccccctggagtttgtttgttttaatttaacaaagtttaattgagcaaagaacaatctgtgaattgggcagctcccaaaagcagaataggttcagagtgactgcagggttgccacacctggttagataacgtttatggacagattcctagagcttttgattcttttttttttttttttgaggcagagtttcactcttattgcccaggctggagtgcaatggcgtgatcttggctcactgcaacctccacctcctgggttaaagtgattctcctgcctcagcctcctgagtagctgggattacaggtatacaccaccaaacccagctgggattacaggcatgcaccaccatgcccagctaatttttgtatttttagtaaagacagggcttcgccatgttggccaggctggtctcgaactcctgacctcaggtgatccacctgcctcagcctccccaagtgctgggattacacgtgtgagccactgtgccaggctggagcttttgattcttaagtccatccacatggagcctccagcaactcaggaattacagcataaatgttcctattggtactggctccagcaacaggcttctgctccctgtaagctatggttctttgtatttgcgtttctaatttgtgaggcattctctctttaaccttaattctctaatggatctaagtgttgttgacttttcagtttattgagcttttttcttattgtgaggatgggaatgatgacttccaatctctttatattagaaaatataaatcagactagagactggaaatttttgttgttgttgttgggtgttttgttttgtttgtttttagacaggtcttgctctctcatccaggctggagttcagcaatgcgaccgtgctcactgcagcctcgactttctaggctcaggtaatcctcccacttcagcctccttagtagctaggactgtaggcatgcaccaccatgatgcctggctagtttttttattttgtattttttgtagacatggagtcttgctacattggccaggctgggtattactgggtatttctttctttcctcctttatttctttccatatttacttattcaatgaatatttgagtgcttattatataccaggcactgttctaggcactggggatatggggatacagcaatgaaaaaaaaagataaataytttgtccttatgaaatttgtattctagagtagggagacataatgaacaaatgaaaacaggcatcagatggtgataggtagtaaggagaaaaagaagtaagggtaatagggaatactgggtactggatggggtacagatattttaaacagagtggtgagaaatagttaatacagctagcaacataaaaaaggagaaatatcaaactgcaaactgttttaggaagataaatccttcatagacccaaagaagctcacaatttagatgtcgaaactagtttctgcaaaaaggggaaaatgtgattgacttggttaaatattcagtattaaattttattgaatttgtctttagaaaaatttcatagttagaacaggccttacccattttgcacatatatacatatgcaccacctttgcagtggcaacatatatatccacactataaacataccacatttataaatcttgtaaggacaagaaatggarttgaataagtaccccccaacatatacaagaaagttagcatacttaccccgtttttcactacatcagaggcaaaataagaaatcttttaagaaaatctcaagactggctcatggcaaaatgaatatgctaaatttgggggttggtttaagcgtggtatgtgtcaggtaattttgtgattaccaaaaagtttycacttgaaaactaagacctttgctgtttatttcacaatgtgaaatcaataaacctgaggatacaagtctctgtagtgatattctgtatttactcatttttacmcatttttgaatgcaattttgctaaggaaggaaagcttacagatgcataaaatgtaactgggaagagtagccataaaaatcaatgaatggatgtggctgggcaagagcctctgtaatactaatacgctgaatggctaataagtcacttcatttcggtgaaacaaatacctaaattctttgaagaattaacaggcttgatgttcaggtctgcttttggcaaatgggcatttaaatactccaagaaggtaagagccagaaaataggaaggtaactatgcttttagaaatatgtttacttagattctcccaaggtttatacttacaggtaaacttagaacaatagctcaaatacctacataggagaaggaaatctcaagggaaaacagttaattttaaagttatttaagaaacagaatccaacaccayagatcagagttcatgctaggattatcatttcaaaaataatgactcatccaacagatatagaataatagcactttaaagatgtttaagagtaaagcacaaaccatgtatataccaagacttagctaattctctgagagttataacttaasacaataaaataattaaaaatagtgttaacattaagtagaatgcaaatctctatagatggtttcctgggaaagtagttttgataagctttcctagcattgatcatcttcaaaaaagcatcaataaacagtccatgtcacttgctttagtttgtttgggcctactaattgctccaacacttctcgggaatgatctataaaagaaaayaatgacaatatattaattgacaataaaaaatgtttaatgtttcctcatgtctaactggaggtgatgttaattattatacagttatttaaaggattaaaggaggtgatctataaagcacaatatacaactaactcactaataattaattaatggtagccctcactattattaggtgtagtgcacctatcatggtattacttgtttaaaaaaaaaaaacaggcatttgttgttttctctgtaatttcatcataattccaccaaccagagtaatggtctaatttcaccattaacctgtgttaatggttaataacttttttcaggatcttagccggaaatagatgattcactaaagtggggtgactgaacagcatttaatgaagggaatatttaccaaaaaagtaggattaaagaaagccaataggtacggtaaaccaccttgggaagctgcaacacacccaaagggttaraggaggtagtagtcaccgaacgtgacaagttgacctgtagctgaacatttttccatgtctgtataatactactataaagcatgattttaaatagataaccattatataaatacactgtaatttaaccaatctatattattggacatttagatgttttcagtttttcacaatgtacagtcgtgattttgatatggtttccatcctagttttaggatgtcttttaaaaatctgaattaaagcaaaaatactgataaaattttgttagtttaaatattactcataagtttaataaacttgtttccatagatacaacctatgttttatgtacaacatatctctaacctagtcttggaaatcctgtaatttggtggttcctagacagatttcacagaccagtagaaaaaaaaaaaaagatgggcccaacatatacagtgacaaaattttattttaagtttaacaaaattaagcaaaaataccaaggtttattgccagcaagagaaccagagagtgtatagaaatgaaaagttattatcattgggaaaacaaaggtttacaattttttaaaaaagcagctagtaagataaatgcagttttattcatggtcataaaaatattattggttattgtagaggaaatctcaatcaaagatrggttcaaattatgttgaaagtaaaagaatggacaaagacataccatttaaatggcaaccatgacaaagctgggtggctatagaagaagggggaaacactttccaactctttctgtgaggccagtgttaccctgataccaaagccagacaaagacatcacatgaaaaagaaaactgcagacaaggatcttttattaatgtagactaaaaaatgctcaacaaaacaccagcacaccaaatccagccactagaagaaaggattacataccatgaccaactgagatttatcataggaatgcaaggttactttaacatctgaaaatcaattagtataatatactgtgttaatgtcctattgctgctgtaacaaattaccacaaatttagtggcttaaagcaacaaatttgttattgtacagttttgaaggtcagaattccaaaatgggtctcactgggctaaaatcaggtgtgggcaggtctgcgttactttttagaggaaagtcttatctttttttttttttggaggctctacaggggaatctacttcctttacttttctagcttctagaaactaccacattccttgcattccttcctgcttatttaaagtgaacaacattgggctgggtgcggtggctcacgcctgcaatcccagcactttgggaggctgaggcgggcagatcatgaggtcaggagtttgagaccagcctggccaacatagtgaaacccccatctctactaaaaatacaaaaattagccgagcactgtggcatgcacctgtagtcccagctacctgggaggctgaggtgggagaattgcttgaaccagggaggcggagattgcagtaagccaagaccatgccatcgtactcttgcctgggtgacagagtgagactccatctcaaaaaaaaaaaaaagtgggcatcattgagcacagtccttctcaagctgccatctctatggtcctctctccttctacttttaaggacccttatgattattttgggcctacatagataatacagaatgatctccctacttaaaaatcaactgattagcaactttaattccattggcaaccttatgtaacataacatactcacattttgggcattagaacgtggatatcattgggtgggtgagagcattattcagcttaccacctacaccattctaatagaacaaagaactaaaaccacatgatcatctcaatagacaaagaaacaccaattggctgggtacggtggctcatgcctgtaattccagcactttgggaggctgagggcggatcacctgaggtcaagagttcaagaccagcctggctaagatgggaaaaccccgtctctactaaaaatacaaaaaaaaaaattagccatgcatggtggtgggtgcttgtaatcccagctactcaggagaccgaggcaggggaatcgcttgaatccaggaggcagagattgcagtgagctgagatggtgccactgtactccagcctgggcaacacagcaagacccagtgtcaaaaaaaaaaaaaaagaaacaccagttgacaaaaaccaatgctcattcaaccaactaggaatagaagataacttcctcaacctgataaagggcgtctatgaaaaacccatagatggcaggatgcagtggctcatgtctgtaatcccagcattttgggaggccaaggtgggaggatcacttgagcccaggagttcaagaccagcctgggaaatatagtgagaccctgtctctgcgaaagaaatttaaaaattagctgagtgtggtggcacatgcctgtagtcccaattacttgggaggctgaggtaggaggatccaattgagcctgggaggcagaggttgcagtgagtgtgttcacaccactgcactccagcctgagcaacagagcaagaccctgtctcaaaaacaaacaagaaaaacctatagctaatagtgaaaaattaaatgttttctccctaggatcaagacaaggatatccacacttttttttttttttgagacagagtctcaccctttgcccaggctggagttcaatgatgtgatcttggctcactgcaaccctggcttccaggctcaagtgattctcctgcctcagcctcccgagtagctgggattacaggcgcccgcaaccacgcccagctaattttttgtatttttagtggagacggggtttaaccatgctggccaggctggtcttgaactcctgacctcagcagtttgagacctgatccacctgccttggcctcccaaagtgctggggttacaggcgtgagccaccgttacccgccaggatgtccactcttgccatttctatccaacatagaaatggcatgtaccagaggttccagccatggaaattaggcaagaaaaagaaaaggcattcaggttagaaggaagaagtaaaactatctatttgtagatgttatactgtgtatacaatatcccaaggaattcactaaaaaaatagaataaatgagttcagcaaggtacaagaacaatatataaaaatcaaatgtatttctatacatcaacaatgaataatccaaaaatgaactagaaaataactccatttatgttaccatcaaaaagaatagaatacttaggaataaatcaaatgaaagtgaaaaacttatactctgaaaactataagactttattgaaagaaattaaagacctaaataaagaaatccaaaccagaaggcttaatattattaagatagcaatatttcccaaattacctatagattcaatgaaattcatatcaaaatacaagctggctttttattttttgcagaaatcaataagatggggcctggtaaggtggctcacacctgtaatctcagcactttgggaggccaaggcaggtggatcgcttgagttcaggagtttgagactagcctgggcaacatggcgaaaccccgtctctactaaaaatgcaaaaattagccagaatttggcccccccagctaatttttctgtaatggagtaaaagatggggtttcaccatgttagccaggatggtctcgatctcctgacctcgaaatctgcccgccttggcctcccaaagtgctgcaattacaggtgtgagccaccgcgcctggccaacacttcccaatttcattttagctggtgtgtctacaatcattttggcatttttccaagttgtgaatatgttatcaaacatatataaaatttgtcttctgtctacatttgtcactattctgttttgaattcactattgcacattataggaagatgcttttccctccaatagtaagcatgtaacatttttatgtaattaaaaatttttgatgccagatggcagtgttatattacagtctccttaggcagcttcttcccatgaagatagagtatttaggactgtgggtttaaataagaatattcaatgcctttattatgctacagggaaaaactatggggtcgctaagtatttcataatctcttggcagaacattttatagaaacacatactctcttggccgggcgcggcggctcacacctgtaatcccagcactttgggaggacgagacgggcggatcacgaggtcaggagatcgagactatcctggctaacatggtgaaaccccgcctctactaaaaaatacaaaaaaattagctgggcgtagtggcgtgcacctgtagtcccaactactcgggaggctgaggcaggagaatggcgtgaacctgggaggcggagcttgcagtgagccgagatcgcgccactgcactccagcctgggtgactgagcgagactccgtctcaaaaaaaagaaaaagaaaaagaatcacatactctccagactgaaaaagggctaacgggtcatttatgctaatcacccgactgatgcttgatgtcaccttcctatttgtttctctatcctagtaacagttaagccactttacattaaaggctcaggaaggaattatagattgtggttcagatgacttaggttttacttccagttctatcaactatttctaagatgtggggcaagccacttaaatcaattgtatctctgttcccttatctttaaaatgagggagttgtatagatgaccttgttggggctcagaaaaggattccccaaagtatggcactttggcatgctgagtactttgaactaaaggacattggaaggcctcagaatccacctcagaaccaaggtctctgaccttctcctgccctcctatctcttacccttcattctccgcaagtgagtcacagaaaccaggattcctcttccccaaggtgggtcacagaaactagaacccttttccccaaaggaagacataaaacctacaaatattactctaaacttccccagcctttctgcctaggagctggccataaagaaattctctgatgtacccttgtcagataggagatcataaggccctcattccagagtggccccgccctataccctggaaaaaggaaggtcacacagaaaggccaagaagaatctgaacaggccttgctgggtttctccactcttactattagttcattctcttttccagtcacatctctacatggctgtccatgcttcataagcataaaaacaagcagttttccctgggtgtttggctcttcatttctgaagtctcttataaatctttgaccaaataaacctgttacgcctttctcttattaacctcccttttcgtataggactgtcagccttgacccttatgatgggtgaggaaaggtatacctttctgcctcccaacctctaaggaactgttgaccacctctgtaaaaatctatgacaatatagatggagagcattttttgaaagattcatggcaggagcacttggaacaccaagaagaagaagaaactatgggaaatacaaacttttttttttttttatgttgagacagagtctcactctgtcgcctaggctggagtgcaatggtgtcatctcagctcactgcaacctccgtctcctgggttcaagtgactctcctgcctcagtctcccgagtagctgggactacaggtgcccaccaccacacccggctaatttttgtatttttagtagagatggggtttcaccatattggccaggctggtctcgaactcctgaccttatgatccgcccaccttggcctcccaaagtgctgggattacaggcgtgagccaccaccgtgcccggccaaagaatacaaacttttaacaaagtatttttttcaaatgttcaaaggaaatgtaatttagacatttttagagaacacacagtgaaaaaagtatggctgaacacatttttacaaataatgatcaaagtcctaatgtttcattacagtgatctggcaaaaataaacatgtcatgtaggattagtaatgaatgaatgaataatgaggaaacagaataatacaggaytaagacaaatatgaaataaaaaaatgagttctcctttaagcaaggaaccagctttaattaaagggaaaccctgaagcaaaccacttgggtcttaaaatactgttttggctgggcatggcagctcacgcctgtaatcccagcactttgagaggccaacgtgggtggatctcttgagcccaagagttcgagacagtctgaccaacatggcgaaaccccgtctctatttataaataaataaataaataaaaatttaaaatactgttttggctctttgtggtaaatcctgacatctacattatccagaatctaagtaaagaacttgctggctgggtgtggtggctcacacctgtaatcccagcactttgggaggccgaggcaggtggctcacctgaggtcaggagttcaagaccagcctggtcaacatggtgaaaccctatctctactaaaaaaatacaaaaaaattagccaggcatggtggcacacacctttaatcccagctattcaggaggctgaggcaggagaatcgcttgaacctgggaggcggaggttgcagtaaactgagatggtgccactgcactccagcctgggcaacagagtgagactccatttcaaaaaaaagaacttgcctttaaatcaggttaaaacaaatcctcagataagattaaaattcaagtcgactaaattgaaagtggcagatttcctgttggattctcctgcctctcagggtaaaacataaggactctctaactgctttattgcccttctaaaatcctccatgtctttgaatactgtcaaacatgcttagataactatgagaaacggcaatgcatgtctgctgtaggagattagcaaaggtatgtgaggtgaacttactgataatcattgaagacctaattgaattaaaatgctttagtaagttttaggacaggcttggtggctcacacctgtaatctcagtactttgggaggctgaggtgggcagatcacctgaggtcaggagttcgagactaggctggccaaaatggtgaaaccctgtctctactaaaaatacaaaaaattagccgggtgtggtggcacccgcttgtgatcccaactcaggaggctgagacaggagaatcgcttgaacccgggaggtggaggttgcagtgagccgagatcactgcataccagcctgagtgacaaagtgagactctgtctcaaaaaaaaaaaacaaacaaaaaaaaacatattaaattaaggcattaaaaaaaagaaaatatttctggcagattagggtcttactgaaattgcatactcatagcataacttttatggaaaacaatttaggactgttaaaaaaatattcatacctattaatccatttgttccatttttgggaattcattatagcaacggaaggaaaagtgactgtcccaatnnnnnnnnnnnnnnnnnnnnttttcaaagctcttgtagcaactcattttctttttttttcttttcttttgagatggagttttgctctttgttgcccaggctggagtgtagtggtgtgatcttggctcactgcaacctccgcctcccgggttcaagcaattctcctgtctcagcctcccaaatacctgggattataggcacccgtcaccacgcccgactcatttctgtatttttagtagagacggggtttcaccatgttggccaagctggtctcaaactcctgacctcaggtgatccgcctgcctcggcccccccacagggctgggattacaggcgtgagccaccatacacagccaaaaccataattttcatatttctaatagcagcttagtttttatctcttctgcagaaaccaactcagagtacttctaacagtttcaagtcctaattcataatgtgaagttatgttttattctaactaaggttaagaaattttataaatacttagaaacatagtcgagaaaataggttaattcaggagatctgatgggaaattacagtgagcagtgctaatctgggagtcaggttgctttgagggtaacaatattataattgcacatgcatatgcaagtatagtaaatactttctatataatataaattttatggtcttaaatactcatatgtgagcaaccatatgaatatataagaggaatcatgttatataaggtgtcacgaaagaagaaaggccttccatgtatcaaacaaaaaacccccacaaacacaaccagcatttatcttccttggaaaaagaagaaattaaaaatcaaatataaggtgaacatgttagcccactttacttccattcaatgatgttagcaaaaatatatcattatagaagatttaggggtactgatggttaagtgggaagagtagaagtgatctgggtagttaaaatttcttcagcttttttctctttagtttattaataaaagccattttatatgaactatttaaaaaatttattttttttgatgtgatgactcaaggtagaatatattgtatgaactcttgcattattatttttatttattttttttgagacgaagtttcgctcttgttgctcaggctggagtatagtggcatgaccttggctcactgcaacctctgcctcctgcgttcaagcaattctcctgccttagcctcctgagtagctggaattacaggcatacatcatcatgcctggctaatttttgtatttttagtagagacagggtttcaccatgttggtcaggctggtctcatagtcctgacctcaggtgatccacctgcctcggcctcccaaagttctgggattacaggcgtgagccaccatgcccggcctcttgcattattattaatattagatctctcaatgttatgataattggccattatgcacaaggcaaagtcgagatccataagagttaagtgatttattcgatgttctggagagatggcgtggatgggatcagcgttcgttttactgtatcttaagattttagttttagtcttagcactattattattttattagacagcaagtctcagttaatgttgtgcaggctgatttcaaacccctggggcctcaagcgatcctcccacctcagcctcccgagtagctgggactataggtgtgcaccaccatgcccagctaattaaaacaattttttatagaagcagggtttctctatgttgcccaggctggtgtcaaactcctgcattcaagcgatccacccaccttggcctcccaaagtgctgggattacaggcatgagccaccgcaccctgacacaaataacatttcaatatctcactttcctattctgtgaaatcagggatcagaaaaataacattttaaaatgtgatggagttggctagggtaatcaaaaaagtgttctgtgctagaaatttggaaatgcttggacaaacgaagttaaacagtttcttagctatagtatttctcagagcctttgacaaattaacattcataatagtggcatgttgcccttcacaaactttttggacatataaacactttttgttttatgttatggcacaccatgtaactgcagtgaatctgaaggatttcagggcagaacaaagaaaaagatgtgaccacaaggtggcagtgggacacaacaagctctctttggacagcgctttgacaggtttgtatgccgggaagtccctcacagcatgagaccttccaaaggcagcgacagtgtagggcggccactactcagaagggggagggtaagagaattcctggaggactagagagagggtgtatgtgtcatgacgttgtttagcagcaagatcggcggggcgggtgggggggtgtctctgggttacagagctccaaagggcagcagtgatttggggtcttttatagcctggggtttttatctatggatagtagacgttgagtgtagtttgcagggtatgtaaagcaggtgggctctagatagatggctaataatttggttatttaggctatacttaaacaattggatgtgtaaacatttgatttggtgatgatgggcttttgagctaacagtcctggttgctgtgaagaagtaaacaacacagggccccaaaggtcatttttagatcatgtaacggtaacacctagtccagcatttaccaactgtgatcttccagatcaaaaatatttttattccaaatattttgaactcctgccatttcaatgtctacttccactacttctggcagccacacaaaaatataagaagtgatttgaaaggggtatgctattctttttttttttttttttgagacagtgtctcaccttgtcactcaggctggagtgcagtggcacaatcttggctaattgcaacctctgccccccaggctcaagtgatcctcatgcgtcagccatcagagtagctgggattacaggcgtgcgccaccatgcccagctaatttttgtatttttagtagagagggggtttcaccatattggccaggctggtctcaaactcctaatctcaagtgatctgcctgccttggcctcccaaagtgcaggactacaggcgtgagctaccrcacctggccagaaaatgatatgctattcttgctgcaaatgttgaagttgactgataatttttctttaccataaagcagtggttcccaaagtgtagtctgcatattctgtagtctgagaccctttcagggttgtgaactgaactagttacttttytcatggaacaccatttttactttttaaaagaatgattgatatggtttgactgtgtcrccacccaaatctcatcttgaattgtagctcccacaattcccatgtgtcgtgagagggacccggtgggaggtaattgaatcatgggggcaagtctttcctgtgctgttcttatgatagtaaataagtctcatgagatctgatggttttaaaaggggaaaccccttctcttggctctcattctctcttgcctgccaccctgtaagacgtgcctttcgccttcagccatgattgtgaggcttccccagccacgtggaactgtgagtccattaaacctctttttctttataagttacccagtcttgggtatgtctgtatcagcagtgtgaaaacggactaatacaatgactacagtgtaaggttattcttatttgagtacttggcagactatttcatgaaaatagaagaaatgaggctgtcatttcaaagaaaacaaatgacagaatttgttgtcagtgataaagctttagctttcaagtgaattttggaagcctcgtagctgccactgtgatcttgaaagctatccaggacctttctaatgacatcagttattatrttaacaactgatttttgttttggataataaaatgtgtcaatatttaaaagatctatataactcagagaaccaatattttccgaactgccaatgcatgatgttacaaaatcatgcattggtaaagatcaactcaaaattcaagacagactagtgcatcataacacaaatgtatgaaaagtgcatcataacaaaatgtacgcaaagttcattgatatgttttcaagttccacattgcaacaacccataagaaattaccacttgctgagttttggggtatcaaagaagagtatccacaatgatctgaaaagtgatgatctgaatgaaaatatatctcttttctaggtaatagatttacgatttttaaaaaatgaatgtctattaaaatttatctgttttaatagaaattttaatttaacaaatatacataaacaaaaactctttggggatcctcagtgattttttttttttttttgagatggagtctcactctattgcccaggctggagtgccgttgtgcgatcttggctcactgcaagctcggcctcccaagttcatgccattctcctgcctcagcctcctgaatagctgggactacaggcgcccgccaccatgcccggctaatttttttgtatttttagtacggacagggtttcaccrtgttagccaggatgatctcgatctcctgaccttgtgatccacctgccttggcctcgcaaagtgctgggattaccggcgtgagccaccgcgcccggcctgggatcctcaataatttttaagaatgtaaatgggtcctggggtctatttgaaaaatactaccagaaagtattatttcaattactgaaacctacaaatggttaagtgttttctcatcaccaacataaaaatacgaaggtaaaaccaatagaattgctctgaaacatacggggaatacaaaatctaagatgcttcttaagtgagttacatttatatcacatatcttttagatttttataaattttgttttccataattgttttttttttttttttgagatagagtcctgcccactcttgcccaggctkgagtgcagtgaggagatcttggctcactgtaacctctgccttccaggttcaagctattctcctgcctcagcctcccaagtagctgggattacaggcacccagccccacactcaactaatttttgtatttttagtagacacagggtttcaccatgttggccaggttggtcttgaactcctgacctcaagtggtctgcccacctcagcctcccaaagtgttgggattacaggcgtgagccacttcgcctggcctataatggtattttaatttgtatgttgaacaaagatggctcttaaggttcaacattaacagcaattctacttttgtctcccttggtccctccaaagctgtccattgaaggatcattcttcccacactcttaaatgaaaatttagttaataccatgactttcacattttttccactatagaacgctcaaacagctgggcgtggtagctcacgcttgtaatcccagaactttgggagkccaaggcgggcagatcacctgaggtcaggagttcgacaacagcctggccaacatggtgaaacaccatttctactaaaaatacaaaaattagccagacctggtggcgggcgtctgtaatcccagctacttgggaggctgaggcaggagaatcacttgaacctgggaggcggaggttgcagtgagtcaagattgcaccactgcactccagcctgggcgacagagcaagactcattatcaaaaaaaaaaaaaaaaagaaagaaagaaagaaaaaaggaatgctcaaccgcatttgttattatttttttttttttggaaacggagtttcactcttgttgcccaagctggagtgcaatgacgtgatctcagctcattgcaatcatttagtgtgattaagctcattgcactcattaatcatttagtgtcattaagctttcctggtgtctgaaatcacatcaactaggcatttatcttaaatccatgatctgttaacatatctttggttactagtgatctccataatgacataatttatctcaaaagactccttggtttgaaaatctgattaaccactccagtatattttccagacttgaaaactggtatttaggccaggcatggtgattcatgcctgtaatcccagcactttgggagactgagccaggtggatcacctgaggtcaggagttcaagaccagcctggccaacatggtgaaaccctgtctctactaaaatacaaaaattagctgggtagggtggtgcaagcctgtaatcccagctacttgggaggctgaggcaggagaagcacttgaacccaggaggtggaggttgcagtgagccaagatcatgcctctgcactccagcctgggtgacagagtgagattctgcctcaaaaaaagaaaaaagaaaattggtatttattgcttctctctacagatgcttctcaatttatgatggggttacaccctgacaaactcataagtcgaaaatacacaaagtcgaaaatgtgttcaatatacctaacttactgaacaacatagcttagcctagcctacatgctcagaacacttaaattagcctacagatgggcaaaattttccgacacaaagcctattttttaataaagtgttgactgtctcatgtaatctattgaatattatactgaaagtgaaaaaaatgcttgcacaggttcttgaagtatggcttctactgaatgcatatggcttttgcaccattgtaaagtcgaaaaactgtaaattgatcattttaagtcagggatcatctgtgtgctgacagccaccacgtccaaccaattaatttttaatagtttaaaaataatccacatgatataaaattcaaaagatacaaaagggtatacaatgacattttttttcctactcttgttccttcacaactttctgtgcagctaaccccagttaacagtttctttttttcttttttctttttctttttttgacacagggtctcactctgttacccagactggggtgcagtggggtgatcatggctcactgcagcttcgacctcccaggcttaagtgatccacccaccttagcctcccacagtgctgggattacaggcataaaccactgcacccggccaccagtgtccttactggctctagtttcttaagaaatgtctttgcataaagatctaatcttcactacagatgtcactgatacccagatacaatctatggttacagccttggttaaggctggcaacctaaaaataaaaaagagaagytgtcaaagggacttcctaaaaataaaagagaagttgtcaaagggacttccaggataatagcttaacctacagaataattgtttagactggctgggcatggtggctcacgcctgtgatcccagcactttgggaggctggggtgggtggatcatgaggtcaggagcctggcctgaccagtatggtgataccccgtctctactaaaaatacaaaaattagttggatgtggtggcatgcgcctgtagtcccagctacttgggaggctgaggcaggagaatcacttgaacctggaaggcagaggttgcagtgagccaagattgcaccactgcactccagcctcggcgggtgacagagcgagattctgtcycaaaaaaaaaaaaaagaataattggaataattatttagactgtaataagaaaaatgagctggaaggactgggcataactactgatttacaagttagatccagtttatrttacggtgtggacctattataggggtaatatgaaagggtgccatggtttctagggtaggaggatatataccatggctcttatacaggcaaaatgggctactgctgttttgttctcctccagtgaagagccacattagcctaagagtccaaatttttctgactttttgtttgtttgtttgagacggagtttcgctcttgttgcccaggctggaatgcaatggcgtgatctcagctcactgcaacctccacctcccgagttcaagtgattctccgtcctcaatctcccgagtagctgggattacaggtgcgcaccaccacacctggctaattttgtaattttagtagagatggggtatcttcatgttggtcaggctggtctcgaactcccaacctcaggtgatccacccgccttggcctcccaaagtaatgggattataggcatgagccaccacgcccggctattctgatcctaatgtctacagtttgataatagttaacaagtcatttagtgtatttgatagatgtaatattataaacttgaaattttcttattgtttacataaagcatcatgttcaatatcatgaacacaaccactgctgccatcataatcttcttcataggtaacatttattgagcactggccaccattaccaccttcatttatcgttatcatgactaacatttattgagctcttactatgtgcaaggccaccacataaggaattgtcagaggccgggcgcggcagctaacgtctgtaatcctagcactttgggaggccaaggcaggcggattgcctgagctcaggagttagagaccagcctgggcaacacggggaaatcccgtctctgctaaaaatacaaaaaaaattagcctggcatggtggcgtgcacctgtagtcccagctactcaggaggctgaggcaggagaattgctttaacccaggaggtggaggttgcagtgagctgagattgcaccattgcactccagcttgggtgacagagcaagactccgtctcccaaaaaattwaaataaaataaaataaaataaagaattgtcagataatcatgactaagtctatgaggtaggtactctcattatgcctgttttacagatgaggaaactgaataatgaaatgggttaagtaatgtactcaaggtcacacagtaaaagatgaagccagaatttgaacccaagcaatctattgcactaacctgttatcaaggggcatccatggaagagtaatatacgtatttgaggacagtaagtaaggacagcttcgacagccccatcagtcagatttacacaatgtcccatatgaatctcctatgcaaaaataaagaaaataaagtcaaatgaaaacaaagatctataataacagtatgaacaattttgagaaacattctgatacaaaaagaaccagatatctacttgcaaaaaaaaagtatatagaaaagaccaatataagtctgaagtaatttggaaggagcagcttaaaaagttaaatgcccaaccattttataaagtaatgtgtaatagctattaaagctgaagatgagtatgccccagaactcagcaattccaattgttgatctacagagaatctcttctacatgtgcacaaggaaacaatttataaatatgccctttgcagtattacttgtaatagtaaaaaaagtggagaacgggaaaatcaatgctttatagaaaacagctaaaatgaaaaatatctacttgtattaatagacataaatctcaaacatgttagttcagaccctttggcaaacagtatggtagtatcttataaagctaaacatgtatttgctatatgacccagcaatttcactcgtaggcatttacccaagaaaaataaaaacatatgtctacacagaggtttgtatgcaaatgtctgcagcagtccaaaattggaacccaaatgtccatcaaatgataaaattatttttaaattttttaaaaatttccataggtttttggggaacaggtggtatttggttacataagtaagttctttagtggtcatttgtgagattttggtgcaaccatcaaccaagcagtatacactgaacccgatttttagtcttttacccctcacctccttcccaccctttccccctgagtccccaaagtccattatgtcattcttatgcatttgcatcctcataatttagctcctacttatgagtgagaacgtatgatgtttgcctttccattcctgagttacttcacttagaagaataatctccaatcccatccaggttgctgtgaatgccattaattcattcctttttatggctgagtagtattccattgtatacatataccacagtttctgtatccactcgttgattgatgggcatttgcattggttccacatttttgcaattgcaaattgtgctgctataaacatgtgtgtacaagtatctttttcgtataatgacttttttctctgggtagacacccagtagtgggattgctggatcaaatggtacttctacttttagttatttaaagaatttccacactgttttcaatagtggttgtactagtttacattcccaccagcagtgtagaagtgttccctgttcaccacatccacaccaacatctattatttttttattttttttattatggccattcttgcaggagtcaggtggtatcgcattgtggttttgctttgcatttccgtaatcacaaatgatgttgagcattttttcatgtttgttggccatttgtatatcttcttttgagaattgtctattcatgtccttagcccactgtttgatgggactgtttgcttttttcttgctaatttgtttgagtttgttctagattctggatattagtcctttgtcagatgtatagattgtgaagattttctcccattctgtgggttatctgtttactctgctgactattccttttgctgtgcaaaagctgtttacatttaattcccagctatttatctttgcatcaaatggtaaaattataaataaattatggcatatccatactatggaacactacttagcaataaaaaggggctgagtgtggtggctcatgcctgtaatcccagcactttgggaggccagggtgggtggatcatgaggtcaggagaccgagaccatcctggctaacatggtgaaaccccccgtctctactaaaaatacaaaaaaattagctgggcatggtggaacatgcctgtagtccccactacttgggaggctgaggcaggagaatcacttgaacctgggagatggaggttgcagtgagccgagatcatgccactgcactccagcctgggtgatagagcaagactccgtctcaaaaaaaaaaaaaaaggaatgaaatattaacatatgcaataacatggatcaatctcacaaacactatgctaagtgaaggaagtaaaataaagaaataaaaaccaaaatagtatattatattctgcagaattccattatataaaattatatgtatataaaattgaatttatatacaattatagaaaagccaaaacaatgacaaagtaaatcagtggttgcctaagagagggtcacagaaggggatcaactacaaaggaccagagacaaaaaaacaaaataaaaccacagagaacacagacaactttttagggtgatgaaaatgttctatacatcaattgtggtggtggttatatggctgtataacaattaccaaaatttatccaactatgcacataatatgagtgaattttcttgtatgtaaattatacctcaattatacctgaaaaatttcagaaaacataattttgaataacaaattgtaaagggacatatattatgaagctattatgtaaaatttgaaagcatataaaacaaggctatatcttatttatagatttgtacataatagaaaaagtatccatttctgtctgagcagggtccacaggaagaaaaaaaagaaaaggtatccaaacatgcaaggagagatacataatcatatttaggatagtggttacttctgaaggcagaaagggagaataattgagcagggctttagatgtaacattattttattttattttactttatttatttttttgagacagagtttcattcttgttgcccaggctggagtgcaatggagcagtctcggctcattgcaacctctgcctccagggctcaagtgattcttctgcctcagcctcccaagtagctgggattacaggcatgtgcaaatatgcctggctaatttttgtatttttagtagagacagggtttcaccatgttggtcaggctggcctcaaactctgacctcaagtgatccacccgcctcagcctnnnnnnnnnnnnnnnnnnnntcagcctctcaaagtgttgggattacaggtgtgagccactgcacccagctgtaacattattttagaaaaagaacaaatccagcactttgggaggccaaggcgggcagatcacctgaggtcaggagttcgagaccagcctggccaacatagtgaaaccctgtctctactaaaaatacaaaaattagctgggcgtggtggtgtgcacctgtagtcccagctacttgggaagctgaggcagaagaatcgcttgaacccrggaggtggaggttgcagtgagccgagatcactgcataccagcctgagtgacaaagtgagactctgtctcaaaaaaaaaaacaaacgaaaaaaaacatattaaattaaggcattaaaaaaaagaaaatatttctggcagattagggtcttactgaaattgcatactcatagcataacttttatggaaaacaatttaggactgttaaaaaaatattcatacctattaatccatttgttccatttttgggaattcattatagcaacggaaggaaaagtgactgtcccaatatataattatttctaatagctaaaaaccagaaacaatctgaattaccaacaataaaaaacaagtatgttacattatacggacagtctgttctctgatatgccaggatctagaacagtaaatgcttaataaatatttattaataaatgaaattttatacagcaaattaaattttaattataaggattaaagaaacttatgaaatgactgtaatataaggctaagaatgtgataacatttattgaggtactaccacatatctagaattgtattaaaagctgaggataaaatgaacaaaatgatgaacacaatgatcaacagagatttcagaaacgatcatgatatttgctaaatgctgtaacataagtttgtactaagtgcttgttgatctttttttctttaattttataatttttttgagacacggtctcactctgttccccaagctggagtgcagtagtgcaaacacagttcaccgtagcttcaacctcccaagttgaaggagatcaattgatctccccactccagactcctgagcagctgggagtacaggcatgcaccaccacctctggttaattttttttttgagatggagtttcgctcttgttgcccaggctggagtgcaattgcgtgatcttagctcactgcatcctccacctcccaggttcaagcctcagcctcctgagtagctgggattacaggcatgcaccaccatgcccagctaattttgtatttttagtagagatgaggtttctccatgttggtcaggctcgtctctgaactcccagcttcatgtgatccacctgcctcggcctcccaaagtgctgggattacaggcgtaagccaccatgtccagccaatgtttgtatttttcttttttctttttttttttagatggagttttgctcttgttgcccagggtggagtgcaatggtgtgatctcagctcaccacaacctctgcctcttgggttcaagcaattctcctgcctcagcctcctaagtagttgggattacaggcatgcgccaccacacccagctaattttgtatttttagtagagacggggtttctccatgttggtcaggctggtctcaaactcccaacctcaggtgatctgcccacctcagcctcccaaagtgctgggattacaggtgtgagccaccgcacccagcctgtatttttcatagagacaaggtttcactgtgttgcccaggatgttcttgaaatcctgagctcaagggatccacttgctttagcctcccaaagtgctgaaattacagaagtgagccaccacattcagcctcttgtcaatctttaggaaaggtccttagacctttaatcaaattgatttccaaattataaataatttagcaacattaataatttaatttcccagaatggaayaaattaaaagcaacagattaaaatgtgatgaaaggtaggcctccgcattacctatgagagtagttagtaaaaaaaaaaaaaaattagggctgggtgcggtggctcacacctgtaatcccagcactttggggggccaaggagggtggatcacctgaaatcaggtgtttgagaccagcctggccaacatggtgaaaccctggctctactaaaaatacaaaaattagctgggcatggtggcagctgcctataatcccagctacttgggaggctgaggcagaagaattgcttgtacctgggagacggaggttgcagtgagctgagatcacactattgcactccagcctgggccacaagagcgaaactctgtctcaaaaaaaaaaaaaaaaaaaattaaggccagacatggtggcttatacctgtaattccagcactttgggaagccaaggcaggagaactgcttgagtccaggagttcaagatcatcctgggcaacatggcaagacccatctctacaaaaaataaaaaagtagccaggagtgggggcacatacctgtagccccagctatttaggaagctgaggtgggaggattgcttgagccagggcagtcaaggctgctgtaagccatgatygtgccactgtactccaccctgggtgacagaacaagaccctgtctcaaaaaacaaaatttaagtttgtccttcagtttgagtcagaggatgctataaaccaaaggttaaagtatattcactcaggccaagcatgtggctcacacctatagttctagcactttaggaagtcaagacaggaggatcactgaggccaggagtttgagaccagcctgggcaacataaaaagaccctgtctctacaaaacaaaacaaaacaaaacaatttttttaaaaagtatattcaccctactttgtttaagtaaggcattaagttctaataaattttagagacatttccattaaaatgttttggcactttggaataatctttggaaaactgaaaaaataaaaaatgtaatgatatggcactataatcaccaacacactggttattgcatttttttctcattctacttaggttggtgctcttaattttataatgttgaggtaaataggtcagtatatttactatcatgcataacaactaatttcttggtggttttatttgaaggtgataaactaatttaactgagaactttatttaaaattatagtaattacaagataatgttgtaagcattacataacctagtgaatataaggcagttagtatacagcctggcataacagtaagtgctcgacaaatgtttgcacttaaaataccaaaaattactgctcctgcatttaggatgcaatttggaattcaaaacttggtataataataaatatagtaatttctttctttctttctttcttttttttttttttttgagatggagtttcgctcttgttgcccaggctggaatgcaatagcgcagtctcggctcactgcaacctcccacctcccaggttcaagtgattctcctatctcaggctcccaagtagctgggattacaggtacctgccaccatgcccagctaattttttgtatttttagtagagatggggtttctccatgttggccaggctggtcttgaactcctggcctcaggtgatccacctgtctcggcctcccaaagtgctgggattataggcgtgagccaccatgcccaacctaatatggtaatttcttaataaaatatttaaaaaatatatatgctaccaagacccagatatataaaatcacaaaaaagaatctctttgggcaataactcaaggataaatattttggcaaaaacgtggcattgtcattccattacaatagttggctttttaaaaaatgtatttatggcagggcacggtggctcacacctgcaatcccagcactttgggaggtcgaggggggcggatcacctgaggtcagaagtctgagaccagcctagccaacatggcaaaaccctgtctctaatataaaaattagctggatgtggtggcacatgcctgcagtcccagctactcaggagactgaggctggagaatcgcttgaacttgggacatggaagttgcagtgagctgagatcacaccactgcactccagcctgggcgacagagcaagactccgtctcaaaataaataaatwaattaattaattaaaattaaaataaaaaagtatttatttatttatttatttaagatataagttctcactatgttgccaggctggactccaactcttgggttcaagggatcctcctgcctcagcctccctgagtagctgggactacaggaatgcaccactgtgccctattaaaatagttatttttactaacatttttataattaatttacagcctgcctacttccaaaaaggatttgatgtagcttactgttaaatagcatagttatattaaaccacttgtcaactggggaagacagaaaccaaaatcctgggataaaaggcttcttaatatatttagaaataggttacaagtgcattagtgattcaattcaaaggatgaacacaaatttaagatcttttttaggccgggtgcagtggctcactcctgtaatcccagtactatgagaggccgaggcggtcggatcacctgaggtcgggagttcgagaccagcctggccaacatggtgaaaccccgtctctactaaaaatacaaaaattagtcggtggcacacatctgtaatcctagctgcttgggaggctgaggcacgagaagtgcttgaacctgggaggtggaggttccagtgagccgagattatgccactgcactccagcctgggcaacagtgggagactccgtctcaaaaaaaaaaaaaaacttttttaaatgatcgtacaatgtggctatcaagaaaaataggatgacaggatgtcaagagaattaatactcctggtagaaatatcattaagacctgaaatcctattataaataatatcactttacactgataaacattcataatcttcatccataataagatgattcttaaatctgttagaagctaaaacttctgggaaataaggccttttattggaagtaaaatgagtttttattttaaagcacctttattttatatcctaacaatttttatttactctggcaataaagagatagaacacccaccaacaaagtccctaaaatacgtaattgataaagcattggttatcygstaggttttaaacataatttctaagaatataaaaatttaatcaccaccatctttataattgytttaaaattacctctaatttcttcgcacaaggtccactaacaagtgcaatcacaccactgtcagatacctaagcaaagggaaaaagaaacacagtccatgaatccagacaacggaagtagaattttccaaaatgtattcattatttagatatagtcttaatgcctcccattcatcaaacatgtgttttagccatatatacctttcacccttgctacttaattgagaggaatatgccaatatatatctcaattacttaaccacaaaaagcatgaagtggtcaatagtttcaacaaaaacaaaatgaactccttatgatatgttctcattagtcatgaaaatacatttggtaaacacatagtctatatgtttgtagcctatatgtcatttacctgagtagctgaaaagtcgacacactgcaaaaatgggcagttttttcctaatgcatgtaaggacacatcagtaatacttaagcagccacctaaatcgatgatctttagcagctggcaattgagtgcaagagcaacgactccttcgtcagtgagattgcagcatcttttcaaagaagcttcgtgtaggtatgaacaagatgaagccacagcttttattcctgggggaaaatataattatatatcaatgagctatatgtgtgtatatgtatacatgagaaatgtgactgattttcattttagcaatcaccagttcagtgttagcccttttcaaagtagtccacctgtgaggaaatactgattttccagtgatgctgtcattattcagaactcttttggaatgtttcaggaattctctacacagkctgtagtatctgcaattaatggcaaggctttattgtccacaggttgaattccttttaggaaataggcaaaagtcattcagaacccaattagatagtgaaatagtaggcgattctccttttggttaaaacaaaaattttcaagtaatcaaattacttttctagtggactttggaggcaaaccaaaagttaaactgcccaaatggtttcagtcatgatcttcatgcttgcggttagaaatttatagctatgcctatgtgttctctctcgctccactttgactctgttctcaaaagtgaatttattttctaccaccatgctccttctgttagcctggaccaatcttacattttcctgagggtcaaaaaagagaagtctttaaatccagttaagctgatataagtgcccattggagatgggtgcacataaataaaagagtacttcggggatcctgggccctttggtcataaacaaacatggtagcactgttaaaagatacctttatgggcaaaatacacagaagggaagatggtaaattcatgggtaggtcatttttactgttttccatatcttaagaaagaactttttttttttcttaagaccagttattttatttatcagtgtccagcatggaagttgtgatacaataagaactgtatttgatctttgttcccagtccctgacacagagctccgaaaagccttataatttcctgagtgaccggagtgccttttgttagtcataataagccccttttgatcatacctgagtttaagctaatgaggtgacagcatgtgacccctagatagcctaaggttggggcctgtctccagaaaaatcaagtgagtagagggttagaacattcagctcagtccacagacctttggcgaggtgggggtcagggacggcagggaataggggatggggattaagctctataaaaactcttgggmcgggtgtggtggttcacacctgtaatctcagcactttgggaggccgaggcgggcagattacttgagctcaggagtttgagagcagcctggccaacatggtgaaaccctgtctctactaaaaatacaaaaattagctgggcatggtgttacatgcctgtaatcccagctactccggaggctgaggcaggagaatcagaatcacttgaacccagaggtggaggatgcagtgagccgagatggcaccactacactcaagcctgggcaatatggtgagactctgtctcaaaaaaaaaaaaaaaaaaaaaaaaaaagaaagaaaagaaaagaaaaaggaagaagaaaaaacaaacaaaaaacctcttgaacaagaagacttgatgagcttctgggttggtgaatgcatccacatgctgggagggcagtgtatcccaactccatggggacaggggctcctgcgcttccagacctcaccctatgtactcttcatcttgctgttcatctgtatcctttataatctcttagaataaactggtaaatgtaacaaaagtgtttccctgagttttgtgagccattctgacaaattattgaatggaggaggaggtcatggaaaccctccatttatagttggtcagtcatatgtaccagaggcctggccttgcaattggcatctgaagtggggatagtcttgtgggactgagcccttaacttgtgggatctgaggctaactccaggtagatagtgtcagaattgaattaaattgtagcgcacccagctggtgtccagagagttggagaattgtttggtgtgaaaaaaccccacacatttgctgtcagaagtgtggtgtgagtgtagagaaatgtggttttattggagaagttcttttttgtgagttattatttatgtaaacatattaaaacttatgcgtgtttgcaatattatgaatatcctaactcgctaaccaagatgactgcaaaatatactcaactacccacacagttttccagaattctaagaggccaaaaaagtccctctttcttatatttaaaaaaaaaaaaaaagcctgggcaacctagtgagacctcgtctctactaaaaataaaaaattcgcagtgggtggtggtgcacatctgcggtcccagctacttgggaggctgaggtgggaggatcgcttgagcctgggaggctgaggctacagtgagccaagattgtgccactgcattccagcttgggtgacagatcaagacactgtcttaaataaataaataaaaataagtattaatgcaaaccaaatattgaaaaaaagaggtctatagagaggaaaaaaggtaaagattcactaactcatgtaatagtgacactgaacaatgcagtttgtctagctataaaaagctatgcattacacaaactgataggagagtacctagtaaatttaatctgatgattaattcttttgtaatatggcatcaaaaaagccttaacaaaatatgaactggtcatttcttcttccactataccaggcaaaatatttaaaatacagacgtatgtatccatgttttgttttttttttagttttaattttaattttatttatttttttgagacggagtcttgctctgttgctcaggctggagtgcagtggcgcaatctcggctcactgcaacctccacctccccagttcaagcgattctcctacctcagcctcccgagtagctgggactacaggcacgtgtcaccatgcccggctaattttttgtagttttagtagagacggggtttcaccatgttagccaggatggtctcgatctcctgacctcgtgatccacccgcctaggcctcccaaagtgctgggattacaggcgtgagccaacacgcctggccaattttttgttgttgttgttgtttatttttgagagagttttgctctcattgcccaggctggagtgcaatggcacaatctcagctcaatgcaacctccacctcctaggttcaagcgattctcctacctcagcctcccaagtagctgggattacaggcatgcaccaccacgcctggctaattttgtatttttagtagagacagggtttctccatgttggtcaggctggtctcgaactcctgacctcaggtgatccacctgcctcggcctcccagagtgctgggattacaggcatgagccaccgcacctggccctattttttatttctttctgatagagtctccstatgtcacccaggctggagtagtggtgcaatctcagctcattgcaactgctacctcccaggctcaagggattctcgtgcctccacctcctaagtagctgggactacagggtgcaccaccatgcctggctaacttttgtattttttgtagagatgaggtaggggtcgggggcggttcatcatgctggccaggctggcatcgaactccttggctcaagcagtctgccggcctcccagctaaaaaagtgctggaatgactgtcataagccacctagcctggcccatgtttattttacatatgtttaaaatacaaggtagtgacttacccagtgtctttcttaactttgagcactgattataagcaagaattctaacttggattattttcttagtctgaatgtttttactgataaatataattcatatttctctgacttcttcatactctcttttgacgtattttctcccttactccacaattttaccagatagtgaatagtaatctaccaatgtactcagtgttaataaacataccttctgaagttacagaaactcggttcccttttgaagcatttaaatttaatttcttcagttttctacagttagacaggtgcaggagagcagcatctgatatatcgcagctccgtagatctagagtttggacttcaggatgtaaaatctataacaaataagtgattttgaaaaaattatttctttctataaatacaaatatttattccatattcagtgttttggtggtcataacagacaagtggctgatgtaaaatacagcaaagaatacagaagcatatccatgtgcagacagacacacaaagcaggagaaaaccacttctacttccagcaggaggtgcagctttcagtgctggcaaagtccttcttgggacacaaagcactgttgagatggctaattcaggggaaggatccatagacctgagaagcttaaccaatgtggcagtgagtaataatcttctggtagctgctggcattagagactctccctatgggcctctgtgcttaggaagtatgagtctttaatcacttgtgtaccaagtgcttacagagcactagtactgcttatctagaacatttaccttctatatcattatttttgggagctaataaaataccccagtattattgggtgttttcttgaggttgacaaataatagattaattcctaagcattctgagctctttcctgtatttttstgttctttattttttttccaaaatagaaatggctttacctttctgaaaataaaataaggtattattattgtaaaacactcagacaatttagaaaaattataataagttataagaataatgatttctatttattagatgcttaccaggaagggtactgtcatatacattatattattttttattttattttatttttgagatggaatttcactcttgttgcccaggctggagtgcaatggcgtgatctcggctcactgcaacctccgcctcccgggttcaagcgattctcctgcctcagcctcccagtagctgggattacaggcatgcaccaccacgcctggctaattttgtattttttagtagagatgtggtttctccatgttggtcaggctggtctcaaactcccggcttcaggtgatctgcccgccttggcctcccaaagtgctgggattacaggcgtgagccactgtgcctggcctacattatgttatttaatattctctctctctctctttccactgcccaccaccccmctgcccgcccccaagggattggtcattgccattttacaaatcgggaattaagaccctgagagcttaagtagccaacataaagaacatagccaaaaggagtggagctgggattggaacccaggtccttttaattccaaagcctaaccttttaacctctataactaaaattacccataataccaatacccagagataaaattatattagctttttaaaactgttagattcagggggtacatgtgcaggttagttacagggatatactgcatgatgctgaagtttaggcttcaattgaacccatcacccmaagagtgaacacagtacttgacaggtagtttttcaatccttgcttcccttcctccttcctcccttttgaagtccccagtgtgtatttttcccatctttatgtctgtgtgcacccagcgattggctcccacttataagtgagaacatgcagtatttggttttctgtgtctgcatttattcattaggataacggcctccagctgcatccatgttgctgtaaaggacatgattttatggctgtatatattcattttgatgttttttgagtttaaaaaacgctttgaagaacaacaggatcagatcacatataagatgagcactttttataaaatcaatagattgtggttgtatattattccattttctgcaagtatcataacttattaaatgcatcctacactggcaaacacttgagttgaacatttaggttgctttaggtaggcaatattatgccgtgattaagaacatgtgctttgcaagcagactgcccaacctggaaccctatgattgccatcaagctcagttttctctctgtgctttactagccttattactaaaacaggatatgttgtgagaaataaaggtgtcttgcttataacatatgctatatataactatgcttattatcataaatgatattataatgaatatatgtgtgtacttttctattatcttcctgagatttctacaggaagtaaattgttgaattaataataagcaaatctttagaatttttaataatgccaaactgtccgtctaaaaggtttttttaaatcaatttacactctcactagcaggagataaaagtgacagtttctccacactattgctaacattgggttttgggatttttttaaagtctctgccaaactgaaaggcaaactgtcactttgatgactagtaaggttaaatatcctttgatatgttattggagatttgtattttttcctctgagtatttcctgattcttctggttttttatttggttgttttgttttttcttattggcttggagggattctttatattgtcaagataaaaaagcccctagattttcatacatactgtaaatatttttccaagtttttgactttgtttcttttttttttttcttcttgccataaggaagtctgtatttttatgtaatcaaatccatccaactttttttcttggtttccaactttagtatcatgtttaaaaaggccttctccatccagagagtataaaaagatttatgaaatacttcaaaaacagccatccaaagatgtgtgtcactttgtaatggatgttgtatctggctttttgaataatgtcataagcaagactcttgttaaggatggagactagagggagagtacccagaaaaatcatgtcttgtttttctatctcattcaccctcttcacccctccttttaaattcagctaaaattaggcttaaaaaatggtaaggattgccatcaaacaaaaacctaagtcactgaaggataagctaaagggatagtaagaaatgtggatggtggaaaagtgaagaaaaccaccatttttctacagtgtcattatggttcatctatgagtcacatataacattacatacttcaacagaaccatcaacaataagaacgtggagatattattctacttccacagagccaagcaaactacaccactaaggtatctatgttcaaatgcaagctaacatgaagaaaataaagcattataataaagatatatcaggttaatgcagaagaaacattaaaaacaggttaaagtgcaattccaatgtaaagtcacagggttagtcacatgctctagcatgtaggctgggcactgtggctcacacttataatcctagatctttgggaggccaaggtgggcagattgcttgagcccagaggktcaagaccagcctgggcaacatggtgaaaccctgtctctaaaaaaaatacaaaaattagctggatgtggtagtgggtgcctgtagtcctagctactcaggaggctgaggtgggaggatcacctgagcccaggaggttgaggctgcagtgagccatgattatgcactctaccctgggtgacagagtgagaccctgtctcaaaaaaaaaacaacaaacaagcaaaaaccacagaaaaacatatgctggagtgctatcatcagaccttgcttccttttgattacaggctttaggcagaaggtgaagtgaagtcagagcaattgtggagtcctaattagggaaaaggagtcaggctggcaggacaaggggaaagcaaataagctacaggtctgcctttcttcatggtccagaacatataaacaaaaagaagaagcagataagctataggtctgcctttctttatggcccagaacatatagccctcctgtgcagacaacatacaaaactcataaacctcctgcttatcaccaaacactttgatctatcatcaaacacctcggctgacagaaggatgcaagttagttccctcctaccttggtgctgtcaatcagcccaagttccattctataaaatccccagcaagcctttgtctcctggcagttgggtcctctcttgctggttctgcccgttgctcccttgcaatgtattttcatattttctctaataaatctgcctttcttggccgggcgcggtggctcacgcctgtaatcccagcactttgggaggctgaggcgggcagatcacaaggtcaggagatcgagaccatcctggctaacatggtgaaaccccgtctctactaaaaatacaaaaaattagctgggtgtggtggcgggcgcctgtagtcccagctactcaggaggctgaggcaggagaatggcgtgaacctgggaggcagaggttgcagtgagccaagatcatgccactgcgctccagcctgggtgaaacagcaagactccgtctcaaaaaaaaaaaaaaaaaaaaaaaaatctgcctttctttacctacaactgtcttggtaaattcttttaccaccatcccaccagcctggatagatgccgctcacccccaacagcaattggcagttctagtctctgcagactagatggtgatggctgcagagtggtggtggctgcaaacccaaagacaatatttaaatgtaagtagtgtagaaactactaactagcattttcactttttgaaacacaaatagcaaaaatacaaaagataacacaggagtagtatcgaaggaaattatctactctgctatttaataacctttaaaatcagaggctgaaggttaagccctaatctcacgggctgtttagcagaacaaagagtgattaacyatctttttctagtgcttggggctctctgccttggagctcatcactccagcccctctccaggcctccaccccctatgtcagcttagtagggccgaaacagacttgggtctggcctcctttactcttaccactaccagagagtatacagagatatgttcacaggccaaaacaagacatctagagagcaccactatttcaaaagaaaaacaaagattactgattccatcaggagcagaggaattagaacagagaggccaaatatattaataagcataataatatgctaaaagaaataagaaaagattaataagataaaacaagaaaccataaaaaggtgaattggaaatattaaatatgaaaaatatagcagttgaaaaaagaacagtatagatgagaagagtgattttttaactactggtcattatccatgaatggattacaaaatcagtttagcagactgtgatcaatattttttcagtaaaataagactaaatagaataaaattaaatagaaaagaccaaaatgtactatacattatactgttacacctaagtgtggtttgtgtactacagtcacaatgtaacgtatatttcttattgtgagtcttgatcaaaaagttttaaactttttgaaaacacggaggtcaagggtacaggtaccatgaagacaagtgtgtatggaaggctaatgggagctgaccagaacaacaccattttgttcctgaatgtcattctgcaactgcttgactgtagaacgtacttgctgatgctgcagatgaaattgctgccacttctgaaaagactatgctatgctgatgactgaactttttccaaacccctgaatcaaggacttctgcctagaaacccttattctaactaatgaattgtttgataaccctctcccacctttctctttaaaagacctcatatatctcttaggacatatgaattaaatagttaggacatgatttcagatgcctctggaatctgtgttccttgaattcaattctaaaaccaccaataaacctttttgcttggattttcagtctccacgactctggttgacacaagagaagtaactgagacaatggtagaagatgttttaggaactattacatgttgcgggaagtcagggaccccaaatggagggaccagctggagccatggcagaggaacataaattgtgaagatttcatggacatttatcacttcccaaataatgctttcataatttcttatgcctgtctttattttaatctcttaatcctattatcttcataaactgaggatgtacgtcacctctggaccactgtgatgattgcattaactgtacaaattgattgtaaaacatgtgtttgaacaatatgaaatcagtgcaccttgaaaaagaacagaataacagcaattttagcgaacaagggaagacgaccataaggtctgactgcctgcggggtcaggcaaaaagagccatatttttcttcttgcagagagcctataaacagacgtgcaagtaggagagatattgctaaattcttttcctagcaaggaatattaagaccctagggaaagaattgcattcctggggggaggtctataaatggccactctgggagtgtctgtcctatgggagtgtctgtcctatgcggttgagataaggactgagatacgccctggtctcctgcagtaccctcaggcttactaggattgggaaaccccagccctggtaaatttgaggtcagactggttctctgctctcgaaccgttttctgttaagatgtttatcaagacaatacgtgcactgctgaacatagacccttatcaggagttctgattttgtccttgccctgtttcctcagaagcatgtgatctttgctctgctttttgccctttaaagcatgtgacctactccctgttcgtacattcctccccttttgaaatccttaataaaaacttgctggttttgtggctcaggtgggcatcacagtcctaccgatatgtgatgtcacccccggcggcccagctgtaaaattcctctctttgtactctttctctttatttctcagaccagccgacacttaggaaaaatagaaagaacctacattgaaatattgggggcaggttcctctgataattrcatatggacattttggttatctggagggaaaaaaacaaacccttatactttataatattctaaaatgtgggccaggcatggtggctcacacctgtaatcccagcattttgagaggctgaggcggatggatcacttgagctccggagttcgagaccagcctgggcaacatggtgaaaccctgtctctacaaaaaatgcaaaaattagccaggcatggtggtgtacacctatagtcccaactactcaggaggctgaagagggatcacctaagtccaggcagcggaggttgcagtgagctgagattgcaccactgtactccagcctgggcaacggagcatgaccctgtataaaaaaaaaaaaattaaaaatgattaccagtcttaccatataccattgttccaaaaatctaaaaccatatctaaacagaaaatataatatgcttgctttacagttattcatactcttacctcacttatatttgaatctgttatctgtccctgcatactcattattttaatcagtctgtcttttatgttgggaggcaaaggcttaatgtctgtgagatatctggaaatattcttcatgaagcaccaaaggcatctgaaatacaaatacaatatagtaaatcacactgggcctgtactgattcctaacacttgtcttaatgctatttgttagcacttagccctttcataaaagtgtgtacattttggctgggtgtggtggctcacgcctgtaatcccaacactttgggaagcccaggcaggaggatggcttgagctcaggagtttgagaccagcctgaacaacatagtgaaaccctgtctctacaaaaaaagaaaaaaaatacaaaaattagctgagcatggtgatgtgagcctgtagtcccagctacttgggaggctgaggtgggaggatcgcttgggcccagaaggtcgagactgcagtgagctgtgattgtgccactacgctccagcctgggcaacagagcaagatcctgtctcaaaaaaaagtatatacattttatattaatactatatttacaactttagctctgtaagcttcaaaaacctagtctgtgttaaattacggacaagatgctcttcctctacaatttttttctatgcatacctcatttatcaaaatgcattttaaatgaccaacaagaatgtttttcctaagtgtctaatttctaagacacatactcctaaataagctttatattgggacccactaattgaaaagttttatctgttaatccagcaaacttgtttttactatttttcttgaaaactatgtggataatgaaatcactagagaaagaaccataaccacaaagattcagcaaatattacaaatcacagagatatcaaactcagtgccagggttgtataggcagaaagtagagttatcaggcaacaaccaagaatcttatgaccaacatatcttatctgtgtcctgaaattccaaccatctgaaaaactcatactttaaagaaacaaatacaaatcttattaatttctgtctacaaatatccccatatatacaaaattttacattcatgagtgaatgtgatcatatacctgtgattaattttttagtgcaatgttaattttttctttttcctcttttggtttcctacacagtttcctctcttgtccttccccctccattagctctctacaccaatgtagcatatattctttcttatttttctctgttcttgtmcacacacacacacacacacacacacacacacacacatttaaaggcttgtgtgggggaggggtcattgtttcctaaaacggcaccacagtacacttacttttatacactgtctttcattcagtatcttatgaaatcccttcaaggcatccgacacagtactgattctcccttaatggtcacatcatatttcacagtacggatgatctatttagtgacttgtatgctgacaagcattaccactatttctaggatatgttgtcagattatttttcagaaagtctggaaaacacttcatatttctattagtagtgtcagaaagctcctttccctctacatccttccagcaatagatatcatggctagtttatttattttttgagacagagtctcactctgtcacccaggctggagtgcagtggcatgatctcagctcactgcaacctctgcctcccaggttcaagcaattcttctgcctcagcctcccaagtagctgagactataggcgtgtgccaccatgcctggctaatttttgtatttttaatagagatggggtttcaccatattggccaggatggtccaaactcctcacttgggattacaggcatgagccaccgcacccagccctatttatttattttatatttaattttaattttatttattctttccatttctttgttatctccatttcccactcccattccccacccctctaggaaaccattctcatgtttaatgtgtatcctttcattgtatattkccttttaacatgtttattgtatgcatgcatttctaatttataaacatgggacttgtcatagatttgtttagtttttcactcagcactgttttcaagatcacctactcttaaatgttggaaggcctaacaggtgaaaatgatgtctcactattactttaacttgtatttctctaattaccaataaacaacatccttgcatgagcttgctggctatctggatatgcttttccataaacaatctatacatatcctttgcctgttttgttatttttaaaaactgatacataatagatgtacatattttcagggtacatgtgataatttgatacattcatataatgtgtaaagatcaaatcagggtaactgggttatccatcaccttaaatatttatcttttgtttatgctaggaacattcaaattattctcttctaaccattttgaagtgtataatagattattattaactatagtcaccctacccatctattgaacactattttttatttgtgtatttatacccattaatcaacctctctctatgccgccatcccctgcccttcccagcctctgttagccacccatctactctctatcttcatgatatccacttttttttagttcccacatatgaatgagaacatgtgacatttgtctttctgtgtctggcttacttaacaaaatgacctccagttccatccatgttgctgcatatgacagaattcattcattcccccctccctcccttcctccctccctccctccttccctacctccctctctcccgagatggggtcttgctctgttgcctaggttggggtgcaatggtgcaatcacagctcactgcagccttaacctcctaggctcaagagatcctcctgcctcagcttctagaggcatgcttaccacacttgactaagatttcattattattttattttattattattttttttcaagatggagtcttgctctgtcgcccaggctagagtgcagtggtgcaatgtcggctcactgcaacctctgccacccaggttcaagcaattctccttccttggcctcccaaatagctgggattacaggcacatgccaccatgcccggctaatttttgtattcttagtagagacagggtttcaccatgttggccagactggtcttgaactcttgacctcgtgatctgcctgccttggcctcccaaagtgttgggaatacaggcatgagccaccgtacccagcagatttcattattttttaatggctgaataatattccatcatatatatgtattataycacattttctttattcattcatccattgatgggcacttaggttgattccatattttggttatttttatttttttgagacagagtcttgctctgttgccaggctggagtgcagtggcacaatctcagctcactgcaacctctgccttccgggttcaagcaattcccctgcctcagcctcccaagtagctgggactacaggtgcatgccaccacactcagctaattttttcttttttagtagagacggggtttcaccatgttagccaggatggtctcaaactcctgacctcgtgatccacacgcctcggcctcccaaagtgttgggattacaggtgtgagccaccatgctcggcccatattttggttattacaaatagtgctgcaataaacatgggagtgcagatatctcttttatatatttatttattttcttttggatatttacccagtggtgaaattgctgaatcatagggtagttccatttttagttttttgaggaccattttgttatttgttgacaaatttgtaagagctctttgttgtggccaaatacatgctctatatattcagagaatgtatattatctacgtgagagatgtaatgttctctctgtgtgttatatatatatgtatgtataagtatctctctccatgtatgtatatgtgtttgcacataaatatgtttaatgtatatatgtttatttacagtattatctaattctactatattcttatttttctactaaatgtggaatttctagtttatgatatttgtaatttaaaatcaagtcttcttttcatttctgcaagtttttgcttgttgtyttataataaaaaatttcaaaaatacagaaatataaaacagggtgatatayatctatgtacctcaaacctagaattttgttactcttttatcatatttgtgtcagacatctcaagacataaaacatttctgattaaggctgagcatggtggcttatgtctataatcccagcactttgggagactgagacaggaggctcacttgagcccaggagttcaagaccagcctgggaaacatggcaaaaccctgtctctacaaataatacaaaaattagctgggtgtagtggcattcacttgtagtcccagctacctggggtgcgggggtgctgaggtgggaggattgtttgagtccaggaggtgaggctgcagtaagctgtgattgtaccactgcactccagcctgggtgagagagctagaccttgtctcaaaaaaagaaaaaaaaaattttctgataaaattaaagccacttttatatacgcgactggtttactctatgtatctctgtttgtagagacaattactaccataaagttttaaaaatagttcctgtccattatttaattatacttttaatactaatacatatatctataaataaattattgatttttaaaatataaataaagttcccttaaatcatttcacaggagttgctacagcagcatggaaagcttttttaatattattatattctcaaagctgtactatgagtcgggggtaaagaaaaaagcccmaaaaattttccaattctcaaattatagcttttacggcaggaaagcattagaatacacctccacctgtaacataaagcaagcaaaccaccagatatctccaactaggatcttaagattccctctaaattgttctctagaaacaccatttgtgcctttaatctgcctttaaaatttttatttatttatcttgagacaaggtctcactctgttgcccaggctggagtacagtggcacaatcacagctcactgcagcctcaacctccaaggctcaagtgatcctcttacctcagcctcccaagtagttgggactacagacatgcaccaccacaatcagctaattttctgtatttcttgtagagatggggtctctatatgttgcccaggccggtcttgaactcctgggctgaagtgagcctcycaccttggcctcccaaactgctgggattacaggcatgagccttgtgctcggccttaatctgctttttaaacaggaacacagaacaaaaaagattgtttgcaaataaacatttgaaagaatatagcaacagctgatcagggtccaggcattgaaacaaagcaatgattgtagaagacaatacaaacaactctggagcaagaaactcaaaagcagagactttgcagtaatgtgtatgctggttatttccattgacctaaaagctctacctgaaacaaatataaactaggaggatctttttaacttattacctgaacagaaagaagtcactgccaccaacaacattgtgcaattttattaaccattcaagtccagtagcatctggtaaaattaggacagaattgggattaaaaaatgaacaaatattccgtatcaaacagttcaaaagaagccactacatactcttttcacaaatatgtttcacaaagccagtacagtactagccattaacccaagtgtactgaagtagcaaagatgcaacaagaaaaatagctatgttagaaagaccaacattttagaaaaagagtaaaactctttcagtttcttccctttagctcctaaaacaacattgtacaggctggatttacctatctagtcctacatcagcttctagaatatttgtcaggagcaaaaaataaaatgacactggccagtatagtctgaatatctaggaagaagagcggggagaaagtcagttcttagaacaaattagtcagcttcagcctcatcaccaggatctctggattctttgctcttccgcatttcttcaacgtgcttatctttctctgcaaacactccagtgtggtagtcatttgcgccttcctgttctctttgttagcttccattttgtgggtcagtttctcttctgctatttcactgaagctgttcttttattgatttctgaagcacttctttctcctgctctcatttttcagcaagctgcttcaagacctcagcttcgcagggcttgtgtctttcttctgaagcttctgatttattctgaatttcctccagggaaagatctttcttctttggaggggaaataaggaactctgggatggattcttttgatggtatctgagaatcagttcaaaagcctagcctgaggcacacttctccagtgctttcacctggatatcagaagtagccatgatgaatgaaagacaagagactggcagtgtattctacaaaatccactgggataaggaaaactctgctagatctgagccacctgaccacactctgagctgttttctgtatttataaaatgtaagagtagtttattaagtttcctaacgtgactaaatttgactaaactacatgacaggtttcctttttgtaagactggtgtcagttgcaaattcatgatattttcttgtggaatattccttttatcattaagtaatgtctctctttatccgtattcatgtttttcactttagagactattctgtttgatttcagtattgctccatcatttttccatggtttcttttgctcaacattatgtttgtgaaatttatctgtatcgttacatgtagctatagattattcatttccattttcacgttgttcatgtccattttcactaacgtataatattctgttgtttgaccaatttattctacagtgaatatacagttgggtcatttgtaactctttattattatgaatatcaatatgaatattcttagacatgtcttttggtacacacgtatctgtgtttcaactgagtgtatatatctagtagtggaactgctggctcatagggtaggcatatgtttagcttaatgccagtttttcaaagtggttgtacccaatcacaatcctaccattggtgaatgagcattcttgtggtccatatccttgccaacacttggcattgttaatcttttaaattttagtcattttagtgggtatataatagcaatgcaatgtggcattaaattgcaatctctgattaatatgggtacacattcatctttttattgtctggttggatatcctcttttgtggagtatctactcaagtattttgccctctttcattttgggttaattatgtttcttactgatatataggaattcctgttatatgctggatatgaaccttctgtttgttatatacgttgcaaatatattcccccattccgtggattgcctttccactttcttaatcatgtcttttgctgaagagaagtacattctaatacagtccaatttatcagtgttttccattacagcaggtgattttttgtcctgttcataaactttccctgtcctaagttcatgaagatattctcctatgttttcttctacaagaattcactaagtttattgtttcacctttcctttttgacttacaaaccaccaggaactgatttttttttttacatttttatttaagttccgggatatacacctaggtattaagccccacatgcattgtctatttgtcctgatgctatcctttcccttgctccccccaaccacaggccccggtgtgtgttgttcccctccctgtgtccatgtgttctcatcattcagctccacttatgacatgcggtgtttggttttctgttcctgtgttagtttgctgaggatgatgtcttccagctttatccatgtccctgcaaaggacgtgatttcatttctttttatggctgcatagtattccatggtttatatgtaccacactttctttatccagtctatcactgatgagcatttgagttggttccatgtctttgctattgtgaatagtgctgcaataaacatatgtgtgcaataagcaaacattcattgtaatagaatcatttatattcctttgggtatatacccagtaatgggattgctgggtcaaatggtattcctggataaacacattcgttatgaagaaagattaaataaattcttctctagtgtcaagctactttaaacttgttttaattcaagactcttccgtggtgccttctaatctgtctacagacagtctaatttaattcagtcttatttaattcacaagaggcagtatcagaaactgggatttcttggtaactaagatttatagttaactttttttttttaattttactttaagttctgagatacatgtgcagaacattcaggtttgttacataggtatacatgtgccatggtggtttgctgcccctatcaacctgtcatctaggttttaagccctgcatgcactaggtatttgtcctaatgctctccctccccttgtccccaaccccccgacaggccccagtgtgtgatgttcccctccctgtgtccatgtgttctcattgttcaacctgaatttgaatgttggcctgtcttgctaggttggggaagttctcctgcataatatcctgaagtgtgttttccaacgtggttccattctctcaatcactttcaggtacaccaatcaatcgtaggtttggtcttttcacatagtcccatatttcttggaggctttgttcgttttcattcctttttctctaatcttgtctttgcctcttatttcagtaagttgatcttcaatctctgctattctttcttctgcttgatcaatttggctattgatattgtatatgcttcatgaagttctcatgctgtgtttttcagctccatcaggtcatttatgttcttctctaaactggttattctagttagcagttcctgtaaccttttatcaaggttcttagcttccttgtgttgggttagaacatgcttctttagcttggagagtttgttattaccaaccttctgaagcctacttctgtcaactcgtcaaactcattctctgtccagttttgttcccttgctggcaaggagttgtgttcctctggagaataggcattctggtttttggaattttcaggctttctgctctagtttctccccatctttgtggttttatctacctttggtctttgatgttggtgacctatggatggggttttggtgtggatgtcctttttgttaatgttgatgctattcctttctgtttgttagttttccttctaacagacaggcccctcagctgcaggtctgttggagtttactggaggtccactccagaccctgtttgcctgggtctatagacctgtctgctgccttttgttcagatatgccctgccccagaggtggaatctagagaggcagtaggccttgctgagctgtagtgggctccgcccagtgtgagcttccttgccactttgtttacactgtgagcatagaaccgcctactcaagcctcagcaatggcagacgcccctccccccgccaagctcccacatcccaggtcgatctcagactgctgcgctagcagcgagcaaggctccgtgggtatgggacctgccaagccaggcacaggaggcagtctcctggtctgctgattgggaagaccgtgggaaaagcgcagtatttgggcaggagtgtacagtcactcagagcttcccttgactaggaaagggaaatcccccgaccccttgcacccaggtgaggcgacgccctgccctgcttcagctcgccctccgtgggctgcagtcactgttcaaccagtcccagtgagatgaaccaggtacctcagttggaaatgcagaaatcgcccatcttctgcgtcaatcttgctgggagctgcagactggagctgttcccatttagccatcttggaagtgacctcccaatttctttttaatgatataaaatctttcctaagcatcactaggatcagaaaagcaaatttttcagaaatttcaaaaatgtagagaaaaggttagacattttgttagggaagtaaaaatatatacaattatacacatataaaattatatttgttctggaatatacaatatgttatttgtattgctcactgtagatctagtgattgtaagaacttatgtagcattttatcaagcctccctatctctttagagacttcaaagacttcagaaaggtatggagaacatcaaatgttggtcaagatggtagtcaacaggaactctcaaacattgagagtaggcatgtaatttggtacaagcatctgagaaaactgtttggccttatctagtaaagctaaagatgtatagatcctaagatctagcaattccagttggaggtatcaaccctggaaaaccttgcacttttgagtcagaagatgtagacaacaaaactcacagcagcattgtttgtaacagagagaactaaaaacaactcaaattaccatccacagtaaatagaatgaattacaatatagttatacaatggaaccttttgtttgtgcaatttattcaagtggttgcatgcggccacagttcatttcgttctcaatatatgttataatatatagatgatacatgtatgtgtgtatatatatatttcattgtgtgaatatactacatttaatttttccattccgttgtcatttgacattgtcaacatacattgctttacttttttcttttaaaaagttgagatgaaagataatatgaaattaatcattttacagtgtgcacttcagtggcattttgtacatttacaatgttgtgcaactaccacctgtatctagttctaaaacattttcaccagcccaaaagaaaacttatctctattaagaagtcagtccctgccgggtgtggtggctcccacctgtaatcccagtactttgggaagctgaggcatgtggatcatctgaggtcaggagttcgagaccagcctgaccaacatggtataaccccatctctaccaaaaatacaaaattagccgggtgtggtggcaggtgcctgtaatcccagctacttgggaggctgaggcaggaaaatcgcttgaaccatggaggaagaggtttcagtgagctgagatcgtgccactgcactccagcctggacaacatgagtgaaactctgtctcaaaaaaaaaaaaaaaagtcaatccccattcctcctttttctcacaaataccaattatgggttgtaatacctcagaactaccaatttgcttcctgtcactattgatttatctggatttatacaatatgtggcctctgtgtctggctgccttcaattagcatcatgttttcaaggtttatccacattgtagtatgtatcagtatttcattcctttttacagctgaataacattcaactatacaaatataccacattttgtttattgattcatcaattgatggacatctgtctgggtttttctacctttggctaatgtgaataatgctgctatgaacattcatgtacaagtatttgrgtacccagtttcaattcaaytgggtatagacttagaagtcaaattgtagcagaattgtaggccaagtgtagtggctcatatctataatcccagcactttggaagccaaygtgggaatatctcttgagtccaggagtttgagaccagcctcatttatttggttgagccacaggtgagcagtctctcaaaacaaaagtgaatgcagagccttgcctaacagtgcaaagccagctgcttatatatctggctcctgcgacagtctgatttgattggtgaggatgatggggtgctgggcatatgggtggccgaaattatcaaggaccgtggagtaaaatgtagcggtttccactggggaagaaaaagaaggacttccgggtttggatgctcaatgggaggtacccaggggaggaagctgggtatctgatgctcaggtatcaatactggggtggcatcaatacaggagtggacagcaagagggaaatatcatcctcaacaccctcagcattccctgtgagccaacctccctgccactctgcattccccacacttccagctggtgaacagcagtctcctgttggctgttgctataattcataacttgggcacacattaagctccttggtctctgatcccttaggggaaaaaggcaaccaaatgcaactgatgaggtctgggtaaagtcttcagtggggaagagaggctaaagtgacactgcaggtggagcctacaaagtttgccaatatctgccttagtcaacaaacaacacgtccttggtcaaggcatattatatttttactgactcttgggctgttgacaatgttacctggtctgccacttggaagaaaacaaactagcggattacagacactcctctttaggactgtgaactgtgaaaacaaatcacagcagagaatcagacagatgtccatggtaatggytcattctctaatggaatagactgcaatgatgctgctaatcaagtatacaccatccagactgctgccactgctgccaggatcagcagtctgcacactgtaacaacacactgcacatagcaacattatctgccatcatggcctaggaacagagtaaagattacatgtatctgacgctaccattgcatgctggtcttgtgcttcctttcaaaagtcagcctgttttgtctcagtgaaatagaccgtattttatggtgtgtggtccctcttacttctgacaagttgactatatcaggcctttgacacacacacacacacacacacacacacacacacacacctggggctattgttaatgtgttacagttgttgacattttttcgggttatggtttcattgttccagtctgttcaaccaacgccagtcacactgatcaaaatgtgttatgtttttggttttccagaccactttcactctgacaatgatatgtcttttactgcgcagaggttgctcaacaatgagccaataagtcaaggtattcaacggatatttcacaccccttatcatccttagggtgttggctccaacaagaagtaaaacggacttttaaaaaatccactaaaagaaatttctgactctacctccttcacactctcctggtccatgcatcttagtaaggtagtttggtcacaaaaaaggcaccctgaaagggttcatagtctcctagccacctcctatataatgatcaggatgaaaaggggagggtttgctagacttagtctgatattctgggattccactctgacaattcctgggcatgatatgcagctttctttctccaaacaatgactccaagtcagcctggttggtacactctctgggtggcagtctggcaaaagggaacttaggaaattcaaacttaattctggttcagccacctggattctcttgttgtactgaaacctggatcaggggtcagcaaactatgacctgtgggacaaatgtagccagctgctagttttcagaaatcaagttttacgcctggcacggtggctcacacctgtaatcccagaactttgggaggctgaggcaagcagatcacctgaagtcaggagctcaagaccaggctggccaagctggtgagaccctgtctctactaaaaatacaaaaaattagccaggtgtggtagtgcatgcctgtaatcccagctacttgggaggctgaggcaggagaatcacttgaacctgggaggcagaggttgcagtgagctgagatcgggccactgcactccagcctgggcaacagagtgagacctcgtctcaaaaaacaagaaagaaatcaaattttattggaacactgcctttgactgacacacacacaaacacacacgcacacacacaccacccctggggctattgttaatgtgttacagttgttgacattttttcaggttatggtttcatggtttcagtctgatcaaccaactccagccacactgatcaaagtgtgttatgtttttggttttccagaccactgcgatctcggctcactgcaagctccgcctcctgggttcacaccattctcctgcctcagcctcctgagtagctgagactacaggcgcccgccactatgcccggctaattttttgtatttttagtagagacagggtttcaccatgttagccaggatggtctcgatctcctgacctcgtgatccacccgcctcggcctcccaaagcagaccactttcactctgacaatgataggtcttttactgcaaaggttgctcaacaatgagccgatagtcaaggtattcaacagatgtttcacaccccttatcatcctcaggctgctgccatttctttatgtgttgtctgtggctgcttgtgttctacaatggcagagctgagtaactgtgtcagagggtgtgtagcctacaaagctgaaaatattactctctggcccttcacagaaaggttaccaactcctgccctagataacaaagataactaccacttggttgaggatactgctcaccaagtacccctacagtgacccacaccagtcaagcaaggaaacaaggtaagtctgtgtaaactttataaaaatgctcttgttcctcttgcacatgacctctgtgagtaggggattagagaaaagtaaagcatttgaagtgactgacaatcactcctgttatatagcagatcccctttatccatgggaaaaacattctaagactccctgtggacacctgaaatcatggatagtactgaatcctaaatcctatatatacaccctgcatttactatgcagacatacctgtggtaaagtttaatatataaattaggcacagtaagagatgaacaacaacaacaataaaatagaacagttataacaacatctacaaggattgggtggaaaaataaaaaatacatgtaacaatatgccagcatcagtactcttgtgctctggtgcaattgttaagtaatatcagggttatgtgaatgcagtagccctgcracaatagctctgataaccaagaaggctactaaatggacagcatggatatgctgaacgaaggcagaattcacatcctgggcagacagggcagggtggcatgagatttcatcatgctactcaaaatggtgcataatttaaaatttatgaattgtttcttcctagaattttccatttaacatatatatatatttttttaccatggttgactgcaggtacctgaaactgccgaaacaaaacagcacataaggagagactactgtattttgctttatgcaagatttcaggtatatttcaatatgttacctttttcctacaacatggctctctgccccccaccgccacctttttctctcagtctctttcatcttagccctttagtatgctcttctctgagctcagcagtgcagaggctgtaccatgtgtttcccaaagtaaatggtttcctctttctgctccagttccctccagctgcaatagcagggagttgggacagaaacaaatcaaatagttcttaaaattctgggaggactattgaatggccacaaagcccatccagaaaccctgctggtcaaacaaattgattaaatttgtcaaatcatgtattacatttactacagcaagggagatcatcttgacagggttttggtagcatttcaatagaggaatgttaggcaagagtatacataagtttctgggatataaacgccaccagtttaagtgggtgcttctccccccacagtggcgaatgggtaaggattaggcaaagtttgtgacttagtttaaaacggatggacacaaaaagccaggcttgatgagcaatctgtccagataaacataatgtttgtcctaaaaatcaaaatgtttgtcctgatagctgtttatttagataaactgatttgcaaaaatttcctagagcaaaaagttaggttgacataagtggtgttgattctcaggccccacagttggcacaggcagtctcatttctyaagacaaaatgaaaagaagtcagctaaaacttataatctttaaaagctgtaaaacaattggggagacgggtggatatcccaaccaatawtagttgctctacgttttatacttaaaagaaacaacctattactatttggccaaatcatcatatggtgaattgatctaacaaataaaagagttttggcaacatggactgcttctaatgtaagtgttacataaaattttgtccttgactttctttttttctctctatagccctcttttaaacttaaccatggcttcctatcatctacaaagttatacccccaatcttagtttcaatccttgatctctcttcattttatttgtgtatttatgtatttatttatttagagatggagtctcactctgttgcccaggctggagtgcagtagcaccatcttggctcactccaagctccgcctcctgggttcaagcaattctcctgtctcagcctcccaagtagctgggaatacacatgtgcaccaccatgcccagttaattttttttgtatttttggtagagacagggtttcaccatgttggctaggctggtctcgaactcctgacctcaagtgattcacctgcctcggcctcccaaagtgttgggattacaggcatgagccactgcacccagcctaatccttgatctttctttcagattcaaaattatattctaactgcctgcttgatatttctactggatattctgattcattttccccgtaagacacttcttcctccataatagtctaatcaccattctacctgtcaacgaagctaaaactaaaagagtaatttctttttttttttttttggggggacggagtttcgctcttgttgcccaaactggagtgcaatggtgcaagctcggctcaccgcaacctctgcctcccaggttcaagcgattctcccacctcagcctcccaaggagctgggattacaggcatgcaccaccacggccrgctaattttgtatttttagtagagacagggtttctccatgttggtcagactagtctcgaactccccacctcaggtgatccacctgcctcagccttccaaagtgctggggttacaggcrtgagccacggcccccaactaaaagagtaatttctaattcttctctttcctcggtccctctattcaaaactattcatgtcccagatccaaaggattctctaaagcagtgttaaagtgctggtcagtgaggagataaggagtttatgcaagaacataaaccaagccctgtttccttcatggagaaagcctcatcagctggactaaataatgtgcttagtgacacacttaattactagtytggctcaagcttcttactttgttacaaaccagaaatagcttgctgaccaactgccagtctcagactgtaccttgtcccagaagggtacaaaattaggttctaagggcaaatatggacctttacctagggaccacactctagcatgacaatgaagatcatgtagtcatccctgtcttagccccaagttctgaagaatttttcttaacattgttagtctgtttcctctttttttcactaagcactgtgttttaaaattctatccaaatgaatctactctttgcttttctttcatttatttatttattttgagaccaggttatgagattggctaactttttatttttggtagagacatggttttgccatgttgcctagactggtctccaactcctggcctcaagcaatccaccctcctcagggtcccaaaatgttgggattacaggtgtgagccaccatgcctggcctaccctttgcttttctaacagctgcataatattccatggtaactctcccattccagctccatgccaccagaaataattctgcaaagaacatcttcatgtgtctcctggtttgggctcttcacctcttaagattttgtaacagtcttctaagtgtctccctatttccaacttctgcctaattcaaatctctctctgctcacagtacagttctaaaacctttgatagctccccatgactgaaagaggaaatgctcttacttcatcctggtccctaagattctattcccaatgacctggctttatgtctcactactgtgctattcatattgtatcttccattcacattggagcgctactttctggtcttctctcatatttctacctttcctgcctgtcaaacctttactctttttatttcactctctacgatacatttcctcccatttgcaaccgtcagatactaccaatgttcaaaaataacccccttgacaaagctttctcctattcttttccttattagaaatttcaaaagtttgttactctcccgcttgtgatattattctacatatattatagttatttattttatttttttgagacagtctcgctctgtcgcctagcagcctaggcgtgcagtggcgcgatctcagctcactgcaacctctgcctcctgggttgaggcgattctcctgcctcagcctccagagtagctgggactaccggcgccactactactcctggctaatttttgtatttttagtacatgccgcggttttgccgtgctggctaggctggtctccaactctcctgatctcaagtgcctcggcctcccaaagtgctgggattacaggcgtgaaccaccgtgcccagataatttttgtatctttagtagaggcggggtttcgccacgttgcccaggctggtctcgaactcctcagctcaagcagttctcccacctcggcctcccaagtttaatgtaaaatatcagatgccattgtttcagaaagccttcagtagattaaggagattgttctccttatccttaagatgtctgttttttacatggcaatattaacggactgaaagctcctggagagacgcaattgcccttgtaacttccatttccgtacaatttctggtaggaaataataataacaataacacttagtggtgtttattatttgctgggcatccttataagggttttacatgttttaaatttatccctcaggacaactccatgtgatgggtgctattatcacaaaaattttatagataaagaacctaggcacagggagaggttacgttaccggtccatggtcacgtggctggtgaatggcagagccgggggctgaacccagcaatctcagccagggatccgtggtcttaaccactttgttacctttatcccagggtctgtcaatgtttattccagttacaggggtggaattctgctagaagcttttgagaacctcatctagcgttgtgtttttttctaccaaggcttttagctgctaagagagaggccactgccagtaacagccggggcgccgagctgtcaaggctgacggaggaatggacgctcatcgcgcagcggagtgttggaggggcaagcccgccaagagacccactttgcacaactgtcctcagccaggaaacgacagatcaggaacccagggacagaaacacacgcggggcctcttcagaggtcggcggggggggtgggaaaggggcggggaggaagagcagcgcagggcctggccgtttggaggaggtgctggggcggcgcgaagggaggcgggacagggtagactcacagatccaggagctgactgacccgccgtgggcgaggcatcgctgcagcgtctgaagcctcttccgcggtcccagggcctccagaacccagccagggaccgtccgccaactcccgcccaccgcgcgacgcgtaggtttttgtgacgtcacacggatttttccggtgaccggggcgtggccacgcttcggactccacaaggaaagaagagagccccctttggggcggagccactgagggctgcgcggaagaggctgggtgtgataaactataaagaggccctaaactcggatgcaacgtgacgggarttgtagttctttcacctggcgggcgtctgctccggttcagctgcaggaggtttcttgggagttcagcccagcgcgcagccccgccgcgacgccgcgagccgagaactctcctggggcgaagggagcgctgagaagtcgctactcttactaaaaggatgcgttggatgctgggccatacccttggcgatgcacactggagacccgctcggatacggactccattaacatcaaacggagcgtgttagaggatccgagtttactgagcactttctaggaagcgtgcactgagctacgtgctttctaggccttagttcaatacttaaccatattcattataatccggtgaaatcgtaattatttagccttattttacagatgaggacactgcgtaccaacaagtaacctcactaagaatttcgtcatggaggagaagggaacctgtattcaaattaggaaggatcctgaagaaagggcacctttaggtggaattttatctttggttctgctgcagagtacttgctgctttttagtgctccctccacccccctcattcttccttgtagattagtctgttgtttgtatgctgagttccttttttaagctccttgaaagttggaacccactgctgttgcctgttcaggatgctacacattgaatcaacatggatttattaagcgctgaacgagggctagggatcgtgctgggtgctgaggattgagtggcgaacacttgggtcagacaagtaaaagggcaattagaataactgttaaatgcttagatggggttagttctatggaagcacccatggttgggggggtgggatacagatcagagagaaaagggtggtctgcaaatagtttgggatggctacactggagagtgatcaagagtgagtgtagggcaggggttggccgactttttccataaagtgctctgaaagttgcagattccaggagaagtaactattgtcagacccagacaaattggagcctagagaccagaaaggaaggaaactcatgcttgtatgtctgagrtaagaactgtctcaaggccagacgcggtggctcacacctgtaatcctagtactttgggaggcygaggcgggcggatcacgaggtcaggagtttgagaccagcctggccaacgtggtgaaattcccgtctctactaaaaatacaaaaaaaaaaagaaaaaaaaactgggtgtggtggcgggcgcctgtaatcccagctactgaggaggctgaggcaggagaatcgcttgaactcggaggaggttatagtgagccgagatcgtgccactgcactccagcctgggcgacagagcaagactccgtctcaaaaaaaaaaaaaaagaaagaaagaactgcctcaaggactttaaaaaataaaccaaaaaacccacaatttcttcacatctttcatgcatttaatgttttgcacaacttgcttgttttgcaaatatgcgcacatttctatgacaagatttattgctaaatattctttaaaactgcagcagttcagataagatactgtcgaaaggacgtttggcccagcagcaggacctccaccaatgaacggactccaattcttgatttgagccttgggaaccaatcaacttwgtttccaagagtttatgtgaacttccctcctttaccagtaaaatcttccccctattcttcccttctccagacccgtggcttgccatagctgtacatcttggattataattctttttgttcactcccaaagaaactcagtatctttggagaattctttctttgttgtcttttagcttcccagagccaaacaagaaatattttaggttttgtgggtcatgctggcttggtcacagctattcaacttgtatcttaaaattagccatagacagtatgaatgggtgggtctctgttccaataaaaccttatcctaaacactgaagtttgaattttatgtaattttcaactgtcatgaaatactcatcttttgatctttttcagccactgaaaaatgtaaaagccatccttaagttgcaagctatacaaaaacagacagtggactggatttgacccttgagccatttgtccatgtgccctcacctgatctagaaagctaaaatgcacatgcctcacgcctgtaatcccagcactttgggaggccaaggtgggcggatcagctgaggttaggagttcgagaccagcctgggcaatatggagaaactctactaaaagtacaaaaaaattagctgggcgtggtggcaggtgcctgtaatcccagctactcaggaggctgaggcaggagaattgcttgaacccaggaggcggaggttgcactgagccgagatcacaccactgtactccagcctgggcaacaagagtgagactctacctcaaaaaaaacaaagaaattacgaattttaagatggtgatagcagagcactaaacccagagtggggcccgtgtgactgcacattttgcccacccatgaagccagccctgggtgcgtccaacttcaggatttccccccccaaaaatcagttcaggaaccctatgtcaaaataaaaatcaaagacaaatatgagcacagagagacatttttacttgcagttcaagaaaatcagactttcagagagtggctcgctaaatagaatagaggaatttatagctcagatgaaatggcagatatttatagctcagatatggcagttcattccaattggataagaacaagatgttcctgttttgtggtaaggaaaacaggatgttcttgtttttgtggcttatctctggaggcaaagcttttaggatttcccgttagtcaaggcttttaggaggttcccgctattcatggtttatctttgaatgcaaagttattgggaatgaaagtcttttctagtgtatggtaagtgatttgtaggcagggttaggctaagggcaagatattttccttttctcctctctgtttgctgtgcccactttaatatagtttcctctagctcagaatctcctccacttcctaccatagctaccatacaaagtaaacgttatcatagattgttgctgtgggtttgttttactttactccaggctggagtgcagtggcgcaatctcggctcactgcaacctctgcctctcggattcaagcaattctcccgcctcagcctcccaagtagctgggattacaggcatgtgccaccatgccaggctaatttttttttttttgtatttttagtagagacgaggtttcaccatattggctaggctggtgtcgaactcctgaccttgtgatccacctacctcgacctcccaaagtgctgggattacaggcgtgagccaccgtacccggcctctgggtttgttttataaaaataattaacaaaattacttttcttaaatcatgctgttaattcataatgtaatatatgagctgtatgtggacccatgttttaaaatacaataaatatatataaaacaagtatatcttatttatatgaatgtgtgctttcgcaagaacagaacggagctaagccaagtgagcccctactttattatcctaccatgtgtaggttattttcaaataggattgctcttaactctccaagtgtcctttgagaaaataacacgtctttttatttagtttcttttcatagcttgttttataatatcacactccaaattggaaataacagtgcccatgctcatggattgttatacattgttgaaatttcccattggctagaaacacttgctttgtttctaggttagagatctgtgactttcaaattctcaggagtctgagtcatacaatggatgactcaggatccaagcaggttaagagttgggcaagttcaaacaggagaagcaaggagatgttaataaaggagctgttcccaaaggtgtggacagagttagggcagagcaagggtaaaggtagttcaataccatagcgctacaatagcaggaagaccttacctcttctggtcctggagggcaaaaccaaaaccttgccagagtgaccacaggtgaagccacctgaaaggaactgtggcctttgaatttgtaaccgcctaaggggttcaccttgccccctgcctagaaagaactgattcatcaagacgggggaattacaatagagaaagagtaattcacacagagccagctgtgcgggagacagttttattattactcaaatcagtctccccaagcatttggggagcagagtttttttttgtttgtgtttttttttcagagtcttgctctgtcacccaggctggagtgcagtggcgctgtcttggctcactgcaacctctgcctcctgggttcaagtgattctcctgcctcagcctaccaagtagctgagattacaggcatgtgccaccacgcccggctaattttgtatttttaatagagacggggtttcactatgttggtcaggctggtctcgaactcctgacctcgggtgatccacccacctcaacctccaaaagtgctgggattacaggtgcgagtcaccacgcccagccaggagcagaatctttaaggataaattggtgggttgggggaagccagtgacccgggagtgctgattggtcaggacggaaatgaaatcatagggagttgaagctgtcttcttgtgctgagtcacttcctgggtgggagccacaagatcagattagccagtttatccatctgggtggtgccagctgatccggcaattgcagggtctggaaaatatctcaagcactgagatatttgaagaaaatcttgaagcctcyagttgcatgactcttaaaccataatttctaatcttgtagctaatgttagtcctacaaagggaatctagtccccaggcaagaaggaggtgtgctttgggaaagggctgttatcatctttgttttaaactataagtttctctcaaagttagttcagcctatgctgaaygaacaaggaggttagaagcaagatggagtcggttaagttaaaactctttcaccgtctcagtgataattttgcaaaggcggtttcagtttgataaggcaacctagccagcctgttgtgatccagccaggaaggggctacaggaatacccttcaagctccattcttcatcccctttttgatgtcctgctgtcggctgtcattgcttcagccaaccagaagttagagctcaaagcatccccgtttatgcgatcaataaaagtcagcttctcagagcctagagtagagaaggagagaaattagaaaataagtaactcatcaacagattactgatttttttggtaaagggattaaatatcaaaaacattttgaaaattaataagaatagcttcatctgagccaaaataataattattatagtttcctttttttcttttttttttgagacagtctcacactctcgcccaggctagagtgcagtggtgtgatcttggctcactgcaatctccgcctcctgggttcatgtgattctcctgcctcagcctcccaagtagctgggattataggagcccaccaccaagcccagctaattttttttgtatttttggtagagatggggtttcaccatgttggccaggctggtcttcaactcctgacctcaggtgatcctcccgcctcagcctcccaaagtgctgggattacaggcgcgagccactgtgcccagcctattatagtttcataacagtgagagggatgacaattgtggtctttcactaagatgctgggagccagcgcaatgacagcttaaaccaccatctttttttgattagcttcacttgttatttttatttttagaaagttatgtaattcctaactcacaattactggttattgcaatggaatcaaatgcctggtatttctgtcagataatcagactttcaaaccccattacttacattcattcaaacaaatatttaatacctgttatataccaggtgggatgtatcagtacatgaatatgtcctctaggagcttacactctagtgtgagagatagaaaagcacacaaacaaaacagcatatggagatacgaactataaagaacaagatggggaggacggattgagagaaagagagagatttatttttgctcaggtggtcatggaaggcttctctgacgctgtgacacttctgctgagatctgaggattaaaaaggaggcagctatgcagagatttagagacagagggaaaagaaaggcactgaagtaaaaatgtgcttgatagcatttgaaggacagaaggaggtcagtgtggctgaatggagcagggagtaggaggaaatgggattggctgagcctgggcccaaatcaggtaaaaccttgacgatcaaaaaactgtctttgggccaggcctggtgtctcacgcctgtaatcccagcacattgggaggctgaggcaggtggatcacttgaggtcaggagtttgagaccagcctggccaacatggcgaaaccccatctctactaaaaatacaaaatgtagcctggcatgtggtggcaggtgcctgtaatcccagccactcggaaggctgagacacaagaatctcttcaacctcagaggcagaggttgtagtaagccaagatggcaccactgcactccagcctgagtgacagagccagactctgtctcaaaaaaaaaaaaaaaaaaaaaaaaacagctgggtgcagtgactgatgcctgtaatcccagcactttgggaggctgaggtaggcagatcacttgaggtcaggagttcgagaccagcctgaccaacatggtgaaaccctgtctctactaaaaatacaaaaattagcygggtgtggtggcgtgcacatgaagtcccagctacttgggaggctgaggcaggggaattgcttgaacccgggaggtggaggttacagtgagccaagattgtgccactgcactccagcctgggtgacagagtgagactccgtctcaaaaaaaaagaagccaggcgcggtggctcacacctgtaatcccagcactttgggaggccgaggtgggcggatcatgaggtcaggagatggagaccatcctggctaacagagtgaaaccccatctctactaaaaatacaaaaaattagccaggtttggtggcgggcacctgtagtcccagctacttgggaggctgaggcaggagaatggcatgaacctgggaggcagaggttgcagtgagccgagatcgtgccactgcactccagcccaggcaacagagccagactccatcttaaaaaaaaaaaaaaaaaaaaaaagacaaaaaaaacccccaaacaaactgtctgattcaggcatggtggctcatgcttgtagtcatagctgaggtgggaggatccctggagcccaggagtttgaggttgctgtgagttatgatcatgccactgcactgtagcctagacaacagagtgagtgaggccctctttttctttttttcttcctgaagtctttgacagagcagagaaagaccttatctctaaaaaaacatagcaacaaaaaaacccaaactaactttgatgcatcagggctgtgaagaagcaacacacacacacagacacacacactcacttgcacacctgactttgaatcttattcaaaatgaaatgacagtattgaagttttaaagaaggggaatgatamccgtgcaacacaggtgagccccaaaattggggcttagcctggggaagtccttggctttacccaggaaataattcaagggtgagctgatagtagaaaacaggtttgtttgtttgtttgtttgtttttgagacatggtctcgctctgtcacacaggctggagtacagtggcatgatctcagctcactgcagcctccacctcctgggttcaagaaattctcgtgcctcagcctcccaataagctgggattataggtgctccccaccacgcctggatattttttgtatttttagtagagatggggtttcaccatgttgtccaggccagtctcgaactcctgacctcagctgattctcccaccttggcctcccaaaatgctgggattacggtgtgagccaccatgcccagccagaaaacagcttttctgatgtggcagtgtgacagctccatgactgctcctgcagagcggagctaccccataggcagtgtattgagaggagcagctcagaggcagttctctaatcatgtttatacccacttctaattacatgcaaatcaaggggcaggtaattcagaaatttctagaaaaggggtggtaatttccaggtcattgccagagagagtggtgctaacttctaggtgttgccacagcaatggtaaactgtcgcgtcactggtaggagtgtcttatgaagaagtgctttccatgcttctctgtttcagccagtcttcaatctggtctggagttgagtcccacctcctacctcaataccatttgggcagcagtgtgaagaatggagggggctttggggagtgaattgcagcatgttttgaataggttagagcctggtggtggcttccccgaaggctatgcctctccttaatcccctctagaatctttagcttcctcacaaggtgggaagcccttcagggaccgagaaggaggtgatggtggtggcaagcagcattgcatctgcaggacctttgggcctggatctgttgccttcaatcttgcattgctgtgatgacagtgataacacttgatatcttagtatcacaggctcttgaatctcagaaccacggaggctgtgtcactaagagcttggtctctgactacagcttctgaatccttattttggcctaaaatgaatcacttgactccttagtaattctattttttcacctgtaatatggggatagtaatataaagcctattcaaagtgcatgaggacaggyaattctcagaattcaaaattttcaagattttagaaagctattatggtacatatgactggatattatgagacaccccattttgagttgggttttcagccacatgtattcttcctaaaaatctgttacatcaccctcttttacctttctcttagcagttaacactctgtaatatcttaatttgtttgtttgttgcttgtctccatcaattagaatgtaagttccttgaaatcagggacttttcttttgtttgccactgtgcctgaaacactttaaacagtacatgatacctagtgaataaccaataattactaattgaaaatgaatgaatgaacaaagctttgatttgtctctttccaatctctacctccttgcctctaatccttcaatgagtttctgggctcagtcttcaaaatgtactcaaatttgaccactgctgaacatctgtggggctgtcaactgagtgcacgcccaggctgaaagtgttgtctgactctcctgttcacctggtaaactcctcactcctcttcccatttgttcattgattccacatttatcgaggtacacgcagggtgctaggcgtgaactcacagtctggtgggggaggtaggagaggaacactgatagagatcattactgcataagaaatggggaagcagtggctcacgcctgtaatcccagcactttgggagaccaaggggggtgaatcatttgagctcagaagttccagaccagcctggccaacatggagaaaccccatctctactaaaaatacaaaaattagctgggtgtggtggtatgcgcctgtaatcccagctacttgggaggctgaggcaggagaattgctggaaccctggaggtggaggttgcagtgagccgagatcgtgccattgcactctagcctggacgatagaacgagactctgtctcaaaaataaataaataaataaggaaaaaaaagaaatggggaatgcagaggtgggtgtggtggtctgggcaggtgaagacctgcagccctcactccaattgcacagaagactaggccagagacaaggagtcactcctctctgctctgtgctggggtggagatgggggttgggattagggtggtggggggttcttttgtgtatatgaggagaagccaggcaaacccttgcatctgttcttcccctcaaatgatattttaaaaaacaaacaagcccagtccagagtgagtacaccttgtcctgcctcttttctcatgtgtttaggtgggagtgaccttctggccccatttgacagtagagaacctgagattaggcaaggagaagccatttccccaggcttgccacaaactaaggccgcaaacagactgtgtaccattcgctcaggagcaattcgtattgcagctcatgagcacccagtccagagccacctccagaacaggagctcaaccctctttttgagagcttctctgaggggccctcctattaaaaatggggaaactgaggcccggagaaaggaagtgacttgcaaggagtaacagagcagtcagagagacctgccccaggagttctaattctaatcaccataacagctattatttattgagcccttcctgtgtgctgaatcttgttccaagcctttacaratagtgtcttgttccatcccccagtgattctatggctatatactaaaagcccacagtcctttatctgcaatttggaagcccaaaaaactctgaagccaaaaggattttcctgtatttgctgcccagactcttctgtgtgaagagtggataaatgtggaatcaattaatgaatgggaagaggagtgaggagttgaacaggtgaacaggagagtgaagctatttaaattatatatttttttggtttgtttgtttgtttaattgtttgtttctttgttgagatggagtcttgctctgtcacccaggctggagtgcagtggcacgatctcggctcactgcaaccttcgcctcccgggttcaagtgattctcctgcctcagcctcccgagtagctgggattataggcgcccaccatcatgcccagctaatttttgtatttttagtagagacggggtttcaccatgttggccaggctggtctcgaattcctgatctcaggtgatccgcccaccccggcctcccaaagtgctgggattacaggcgtgagccaccacgcccagcctatttatattttttaataataatttttattgataaattttaaaaattagggggaaaaggtgtgaatagccatacccttattagcgtttcattgttttgtaacaatacacatttaccaagtagcaggagtctgagcatggcttgactgggtcctctgcttatggtctcaaaaggctacaatcgagctgtcatcagggactgcagtctcacctgggttcagatggggaaggactcacttccaagttcactcatgttaatggcagaattcagttccttgaggtcgtaggactgagagcttcaagttttttgttggctgttggctggaggctgccctcagctctgagaggctgcctgtatttcttgccatgcagagtcctctaacatggccatctgcgccctcaaagctaaactgggggagggggagaaagatgggtgctaccatcttatgtaacatgaccccaatcatgtacacacaatcacatacatcccatcatctttactgtttctttcagttagaagcaagccacagatcctgcccacactaaggggaaaggatcacataaggggaggcaaggatcgtggggccaactaagagtctttccaccacaaaccacaaagccttccactgcaaatattattgtgtttggttatgtcctagaaaaaaataaggttttaatctcacatgaaaagtcagaatgccagactgggcaatatgggaaaacctcatctcttccaaatatatatatatatatatatatccagctgtggtggcacatgcctgtagtcccagctacttaggacgctgaggtgagtggatcgcttgagcctggggggggtcaaagctgcaatgagccaagactgtgccactgcactccagtggacaacagagtgagacactgtctcaaaaaaaaaaaaaaaaaaaaaagagagagagaaaaggaaggaaggagaaggaagagaggaagagaggaagcgggggagggagggaggtcagaataagaggagggaggtcagaataggatagttccagggttggttgttcagtggcttaatgacattataattcctgctcagaacctctgtgattcccttgagttttcctctcatgctttcaagatggctctgcaggtccaagcaatacatccttgcactgaggatgcaagttaggaaaattctagttcattgctttactttgagcctcttatttgacttattccattttacttgtgaaatacgcatgtgacagctggaattggcattagacatgttagacagaaagtaaaattgagtatatttctgattctcaagcatttgtttttgccactgtttaagaaataagcaatgcattgtcacatactaagcactcagttgtttgttgaatgaaatataacactgtagggtagggtaggagaacactaaagttcctggaggcaggtaacatgtacttgtatttttctcacatctctcttgttaagaacacaaaatctttgcctagaagaactcacagcagcatcctcagtactatggcacttgctatgattaaaccaatcattaccaagggaaatgagatatgacttagatcaatcataattcatccctcaggatgggcatgagtctgaatacccctatagcacatggccatctgatacctgaacaaaatcaggattctgttaaaaaagaagaggaagggagaaggaatgactataaacaacaagcaccatcctccacagattcaaggaagaattaaaaggggtagtaaggtggtctctctagagaggcaaygttttacttgagatttgccaagaaattgtcagacttgtgaaatctgcggactagcaatccgtggggtgggtaaggaagagcaaatatactgcttagaggtacagagtttctttttggggtgatgaaaatgttctaaaattgattgtggtgataattgtacaattctgtgaatatactaaaaatatatactttaaatgggtgaattgtatggtatatgaatcataccttaataaagctgctatttaaaaaaagaatagtaatgtaataccttgagacaagacaagcttgatatgaattataagaatggtttgactgggtcagattcagtgaaaaattttcataatagacctttaattattgttaatctgctaaaaaacagtatggaacttaagtaccgagcttctaatggaagatagagaaataccctatattttcaggtgggatatttcctatcggtgtttttttcccaggaatgcagttttcctaggcttcaagctgctcagaatatgtggccttcaatagacctgcagccaggattaggtgggactttgcctcatctgaagggcttcttcttattttatttatcgtaattttttgtagagataggatcttaatatattgcccaggctggtcttgaaatcctggactcaagtgattctcccgcctcagcctcccaaagtgttgggattacaggtgtgagccaccgcacccgacttacagggcttcttctatacttactaattctcctaatgtgtgacatctggtctactacttaaattggtgcttttccattggatataagccttagcaatagatattacctaattttctcttacctttttatgggtggggttattttcattataatttttttttcctgggtttgcacaactgccagaaaacattttatcagagctaggttatgaacattgcaggtgggcctttcaacttcctgcagaagtgcagaggtgcaactgagcattcactaagaactggcacttstccaaactgtgcaaaagagggagtgcaagtctgtctcacacacgtaattgaggaaggaaaagaaggccagtgttgctgaagcttagggaaggagataaagacagagaggtaggcagggactagatcacatagtgccttgagaatcatagagatttggttacagctaagtgcaattgggagaatgttggagggttgctctgaacaaggacatgacaggatctgatatgcatttttaatagattaattttggggaaaatatatgtaacacaagtaactgaagaggatgtgtatctagattttaaaaggtactgcaaatcaatatgatgaaaacacacacacacacacaattggaaaatcagcaaaatacttaagcaggcacttccccacagaggaaatctaaatggtcaaaagcatatgaaaaatgttctgtcttgttaatcaaccagggaaatacatgttcgaacttccacatgttggccgggcgcagtggctcacgcctgtaatcccagcactttgagaggcggaggtgggcggatcatgaggtcaagagattgagacaatcttggccaacatggtgaaaccccgcttctactacaaatacaaaaattagccgggcgtggtggcacgcacctgtagtcccagctacttgggaggctgaggcaagaaaattgctttaacttgggaggtggaggttgcagtgtgccgagatcgcgccactgcactccagcctggtgacctagcaagactctgcctcaaaaaaacaaaacaaaaaacgaacttccacatgttaaaacttgtacaaggccgggcatggtggctcatgccagtaatcccagcactttggaaggccgaggctggcagattacgaggtcaggagattgagaccatcctggccaacatggtgaaactccatctctactaaaatacaaaatattagctgggtgtggtggcacatgcctgtagtcccagctactcaggaggctgaggcaggagaatcgcctgaacccaggaggcggaggttgcagtgggccaagattgcgccactgtactccagcctggcaacagagcaaggctctgtctaaaaaaaaaaacaacaacaaaacaagcaacaacaacaaaaaaacttgtacaaaagccagaggcagtaacaggagcctgtagtcccaactactttagaggctgaggcaggaggatcacttaagcccaggagtttgaggttgttatatataaaggttcggtgccgcaaaagaaatagcactcgaatataaaattttctttttaattctcagcaaggcaaggtacttcaatagaagggtgtgcccttacagatggagcaatggtgagcgcacacttggataagggaggggaaggggttcttatccctgacacacgtggcccctgctgctgtgtggttcccctattggctagggttagacctcacaggctaaactaattccaattggctaatttaaagagaatgacagggtgtgtgctttggcaggagtcagggcagggcaggtagcaggtaatcagaatgagttagggtggagtaggtgaccagaatgagtcagagtggagtaggtaatcgaaaaaggtagctttacgaggaagttaagtttaaaagtagaaggcaaataattgaacatactgacattaattctttgaaaagaaatttagaactcatatctaacaaggctatggtgcagtatgattatgcctgtgaatagccactgcactgcagcttggggaacatagcaagactccgtctccaaaaaactccccccaaaaaactgtacaagccactaggatggtaaaagtaggaaaaacaatctgacactctcaaggaactttgacaataccaatggaaactcaccctttggtagagcattaaacaggttgtaaccattttggaaaagaaaggctgtgcatcttcaagtttattagacagtctgatatctacattctcctagttatatatcttagagaaactcttgcatgtaagtgccagaaagcatgtatcaaagtgtttattgtagcactaataataactgaaaacacccaaaagtccattaaagagtataataaattatgatattaattacaatatatgaaattctatacagagctacagctatatgcataaggacagatgaagctcacaaacattatattgagccaaaaagcagcaagtcacagaaaaaaaaaatagtgagattccatttatataacttgaagatgggtaaaacctaaactatattgtttaggttgtaatattggtgatattgcttatggatataagtgtgagataaaactaaagcaagagaatgatcatcacgcacacacacacatacacacacacacacacacacaaatacatgcacacaaagaactgcatttatctttgcagaaagggaggaaatgtgagcaagaagaggtcttatgatgtcctgaaagtgttccgtttctatgaagcatgaaaatttttaattttgttgaagtccaacctatctattttttttctttgattgcttgtgctttggaggtcatatttaagaaattcttgctaaattcatggacacaaagatttacacctatgatttctttgaagagttttataatttcagctcttacatttagatctttggtatattttgagttaatttttgtatatgacatgaggtagggggtccaatattattcttttgcatattgtgttccagttctaaacctgtgtgtttggatacatggatatttactttataatatattttatatactcttatgtatgtatattttatagattgaaaagtataagagacaatggctttgggtactgtttggagtatcctgtctgtggagaataagttgtgaaacagagaaaatcagaaagaccaattgggatgtttcaaaggtttctggctaaagtaacagtatggatggtggtgccattaactaagacagcaatgaatgcaaaaagagcaagttttgtggggagacacaaaattatctttaggatatgttaaatttgagaagcattttaaacatccaagtggagaagtcaaaatgtaattggagcctggtgtggtggaacatggatgtagtcccagttactraggctgaggtaggaggattgcttgagctcaggagtttgagaccagcctgggcaaaatagtgagacccccatctccacaaaaatttaaaaattagccagctatgggtggcatgcacctgtagtcacagctattcttaggaggctgaggcaggaggatcactcaagtccaggagttcaaggctgcagtgtgctacaatcacacctgtgaatagccactgcactccaacctggacaacgtagtgagacctcatctataataataataataataaagcagcaaatgatatatgaattcagagttcagggaagaaaacagggctctaggtaytcatttgggaatccgtaayatgcttgtcataaagctatgggactgactgagattaaatagggaaagaatgtacacaaaaaacagaagagcatcaaggacccagctctagagagtcctaatatttagaagatgaggagaaaaaagaggcaggtactagcaaggagattgagaagaagcagccagtgataaagaggggaaacagtgtggcttcaggaaaacttcaagaagaaagtgtttcaaaaagaaaataatggtcagctactactgagaaattaaytgtgatttggatagagaacaaatcattagatttggcaagataaagatggttggcaagcttgataggggatgttttgtggcagatggcaagtgtcggtggctttatccaattctgaacaggatatttgctagcatgcacacaagaccgtaattcctctttcataatgaatgctactaatgttacacaatgtcagatgagtcacttgacaatgtaattttccagtagcagtgtgttttgctttctctctgagcatattttgaataatttcacattaggtttttacaaaccttttgacagcagtaagaactgtctgttttaggatataagaagtgcaaatctgaatggatatctagttttggcctctttctgactttagcaaaagaattatttaattttttactatgctgttttgttttagaaatgaaaaatttaattggtttaccagtgctcagtgttttgttagaaatcaaaatgaaggtcgggcgcggtggctcacgcctgtaatcccagcactttgagagaacgaggtgggtggatcacaaggtcaggagatcgagaccatcctggctaacatggtgaaaccctgtctctactaaaaatacaaaaaattagccgggcctggcagcgggcgcctgtaatcccagctactctgaggcaggagaatggcgtgaacctgggaggtggaggttgcagtgagccaagatcgcgccactgcactccagcctgggcaatagagcgagactccatctcaaaaaaaagaaaagaaaaaaaamatcaaaatgaaagcatcattaacttcatgtcaaaacttgacagrcttacttaaaagataaacatggtgtaaaaaaaagagtagctggattgctcattttcagatatccactttcatacttctattcacatttttctttacttgtttctataaaattatcatattcacctatttcctcagtgaaaatggggctcttgttaattttttatatttgtgacattctctactttaatattcacattactattttcatcactatgttttggtttagtgaaatactttcaaagtcctcgataacatttttttctataaattttttattttttaattatccgggcatggtggcttcrcctgtggtcctagctacttggtaggcagaggcgggaggatcacttgagcccatgaggtcgaggctacagtgagccatgatcacgccactgcattccaacctggtcaacgtacgtagcaagacccagcagtgttgtcttgagcatgtcacttaacctctccaagtctgtttcctcatctttcctttgcaagcacagcaagtccctgtaataagataggcacaactgtctgatccaggtaggcacgagttggcaaagactggagatctaccttctgctttgatgacttttctgcattaatcttctcattttctactatcctctggccaggcacggtggctcacccctgtaatcccagcactttgggaggctgaggtgggcagatcacgaggtcaggagatagagaccatcctggctaacacactgaaaccccgtctctacttaaaatacaaaaaattaaccaggcatggtggccggcgcctgtagtcccagccacttgggaggctgaggcaggagtccataacatttttttaaacattggcgatataaggccacactggtaaccacatgaaaaannnnnnnnnnnnnnnnnnnnnnnnnnnnnnnnnnnnnnnnnnnnnnnnnnnnnnnnnnnnnnnnnnnnnnnnnnnnnnnnnnnnnnnnnnnnnnnnnnnnnnnnnnnnnnnnnnnnnnnnnnnnnnnnnnnnnnnnnnnnnnnnnnnnnnnnnnnnnnnnnnnnnnnnnnnnnnnnnnnnnnnnnnnnnnnnnnnnnnnnnnnnnnnnnnnnnnnnnnnnnnnnnnnnnnnnnnnnnnnnnnnnnnnnnnnnnnnnnnnnnnnnnnnnnnnnnnnnnnnnnnnnnnnnnnnnnnnnnnnnnnnnnnnnnnnnnnnnnnnnnnnnncttttacctggtaaattttttttttttttgagaacggaagtctcgctctgtcacccaggctggcgtgcagtggcaccatctcggctcactgcaacctccgcctcccaggctcaagcgattcttctgcctcagcctcccgagtagctgggactacaggtgcgagccaccacgcccagctaatttttgtatttttagtagagacagggtgtcaccatattggccaggctggtctcgaactcctagacctcgtgatctgcccaccttggcctcccaaagtgctgggattacaggtgtgaaccactgcgcccggccttacctgttaaattaatgttagtggaaacacattgccaaactcaatttttcaagtacatgtatcttcaaaatacaaatayacttcaaagctactgtactttgaaatatgttatcttcaaaaatgacattatcactaagaatataggaagccttaagaattgaatatggtggttcaaaattagtatttttcctctttgtaggggaaatcacccaaaagtaacaatcagaactgttaccacctgactggttcttgcccactgcacagataaaaccaaaacactgagccagcaggagttgcagcagagaaagagtttgattattgcaaggcaatagagtgaggaggacgggatacatttcccagatccacctcaccaagaattcagaggctaaggtttttaaggatgatttggcaggtagggcattaggaaacagatgttgtggattggttgggggatgaaatcataggagtgttgaaactgtcttcatgtgctgagtcatttcctgcaggggagtggtcagaggaccggttgagtcagttcctttgttgcagtcacggtcactgttcaagctggtgtcagttgattcacctgaaggcaaagtctgaaaaatatctcagagatcagtctcaggtttcacaatagcgcttgtgactgcctgttacataactcctgagcaataagcaattatagaaaagcaaacaagagaacaatgatgggctatcattcaactacgcctacagcttaagaggtgagctccctggtgattgaaactgcttgcactcctcagttgatccaacttctggaaaatacaaaggcagtctgcatgacttaaagatcattggttctttttctttttttttttttttttgagacagagtnnnnnnnnnnnnnnnnnnnnnnnnnnnnnnnnnnnnnnnnnnnnnnnnnnnnnnnnnnnnnnnnnnnnnnnnnnnnnnnnnnnnnnnnnnnnnnnnnnnnnnnnnnnnnnnnnnnnnnnnnnnnnnnnnnnnnnnnnnnnnnnnnnnnnnnnnnnnnnnnnnnnnnnnnnnnnnnnnnnnnnnnnnnnnnnnnnnnnnnnnnnnnnnnnnnnnnnnnnnnnnnnnnnnnnnnnnnnnnnnnnnnnnnnnnnnnnnnnnnnnnnnnnnnnnnnnnnnnnnnnnnnnnnnnnnnnnnnnnnnnnnnnnnnnnnnnnnnnnnnnnnnnnnnnnnnnnnnnnnnnnnnnnnnnnnnnnnnnnnnnnnnnnnnnnnnnnnnnnnnnnnnnnnnnnnnnnnnnnnnnnnnnnnnnnnnnnnnnnnnnnnnnnnnnnnnnnnnatcacaaaaaaaaaaaaggactatgttacgtaatcatgcctggtagatgaaaatgtcaaaggggaaagaaagtaagtgtaacaaacatctattagctgtgcctctattttaacaaaatttaggcctctctaaattacaaagtaagtggaatggttgagtgtgggagggcattaggggtgcagattttagaagtattttattagatttagggtttgggattagattagatgaggggtaataaatgattgctagggagaatgactggatcagggaacagaaattaacttgtaggtagttctctttggaatttaaatgatccttggagagagtcagtcattatcttgaaaaagggtctgtttaggtgtggttacattttcggtcttacagatgttaccaaaacacccaagattcagtctaggtcctgttgctcccctcacagaaagccaatcattaagacaatgagtattgccagggaagaaggctgtaatccagtgctgcagcagaggagatgggagatcagtcccaaatccaactccctgactgtctaaaatttgggatttgtatagcagggaagaaatgtaactatgtgtggaaaaacgggaattttagggaggggtaaggaagagaaaggggtcaacaggaagcaggcagtcatgattggtgagrcgtctggctccctttgtccagatgtgatgatctggtaagtttcagctccttgatactgtctgggaggactgatggtttcttttctgagaaagcaactcagataagacagatgtaattttctcaagttttaagaccaggaggataaatttctatgtttattaaaargaaccataaacatcacctctacaggacaattgggcaggtttcccagggaagggaagaaaactattgttctccttggtgggtctggakcttaggcaggtaaaggaacttgagcctctttggaagagctggtgaggggtgggtagatcagagagaccttgagtcttcttagttcaggatgtaaacatgccatattttggggaattggtttctaagcctcaacattacagacaggaatgaaaaccgaccttgtctggaggagaactttccaagtttggtacagaggactcccacagattatgatgaagccatcaactcacaaacwggattaccaaacacacaagaaggcaatcactgtgagagtcagcagaaacaactgatttagatttctcaaatatttctagtattagaattataattacatatataygacataaaacagctgtgtatgaagtgtttaaagaagtatataatttaaaaagtgagccttcaactagaaacaggaatgaacagaaacattttggaaacaatccaaaaagaaccaggaattaaaaatataatggggtgactcacatcygtaatcccagcactttgggaggctaaggcgtgtggatcctttgagatcaggagtttgagaccagcccagtcaacatggcaaaaccccgtcactacaaaaatacaaaaattagccaggcatgatggcacatgcctgtaatcccaccactttgggaggccgaagggtggatcatttgcggtctggaattcaagacaagcctggccaacatgatgaaaccccatccctactaaaaagacaaaaattagtcaggtgtggcagtgtgcgccttataatcccagctgcttgggaggctgaggcaggaggttgcagtgagccgagatcgcaccactgcactccagcctggccacagagcgagacttcgtctcaaaacaaaaaaaaaaaaaatgaggtcggggatggggaagtggtggtaggaactcagtggagggatgaactagcagattagataactcaagtgagaatttgtgaaccagaaaatatatctaaataactgatccagaatgcacagggagaaacaaggaaatggaaaatatgaaaaaaaggttaaaagatatgtaagataggatgagaatgagacaggatagttcatagttcaaggtcaagtcttgaccttgaccccctttgtgggcaggaactggagtggcttgtttcactcagcctgcagtccgtggatggctaagtgttaacagcccaggctgacagccttctgcacctgcccttcttgacacccgaattcttattcagagtccaggaagaatcaggtcacataaactttttgaagggtagtgtatatggaagattttactgtgtgataaaagtggctctcagcaggatggggaattggaaaggggatggtatgggaagaaactgctctttctctgaagccgtgtctatctgtagtttccgatgctcagctgcatgtattcctgatgctcagcagcttgtatccccgaccacttgcatcagctgctgaggttgctctttttcttccttttgttctgctagctggtctggtatttataggcatatgacagggggtggagcgggccaaaaaagcaatcatttgggtggaaaaaatggggtcagctgtttcacttaggactgaggttccaggcttgagggtgaagtttagcctggagcccagcagttctgcatcaagaagatttaacatacacttagtttcaattagaaagatagtgagaaaagaktagaggcaatgtgtaaagagataatggctgtgaatttcccagaactggtgagaagcatatacccacagatcttgaaagcaaagaaaaaaaaaaataaggaaacagggaaacaaatttaaaatataatttttwaaaaattgcagagaaaaaggaaacgagtctaaaaatgtaaaatggcatattactaaaaaagattccaagtagtcaagagcaatctatgtcctgataaaattattagatttcaaaaagaattatttaaaagccagagaataaatcacttataatgagaaaaacaggctgatttcagatttctccacagcatttgttcttagaagacattatgtatacataccaataaaatcctccagcaaagagatgtgacccaggaattttgtatgcagtcaaactgttgcttaaatataaaggtaggtggtgtggtgcctcacgtctctaattctagcactttgggaggctgaggcaggaggattccttgatcccaggagttcaagaccagcctgggcaacatggtgacaccttgtccctaataaaaataaaattaaaaaaaaatttagccaggcatgatgatgcatgcctacagttccagctacctgggaggctgaggtgggaggatcgcttgagtgcaggagaytgaggctgtggtgagccatggttgcaccaccacactccagcctaggtgacacagtgagaccctgtctcaaaacaagacaaaacaaacacacacacatatatatatttgtttatatacatacatatgtatgtatgtatataaagccaaagagttttgaaaacacaacatcttaagggtattgtttgtattaactcacatgaagaatccaccaatggacaaatgttgtcaaaccagagatgactagaaagcactgggtagatagcataagcgctgctggtaaattggcttaaaackaaaataaatgtgggattgttgttattaaacagaacaaatatamacattaagaaacataatataattaacaaaaattgagaagttgtagagagaaaaaggaggtggaaggaagaagaaagctactaatttaattattagcaattatcagaatagggcattgataatagtggttaaagaaagaagatcagggccgggcacagtggctcatgactgtaatcccagaactttgggaggccgaggcaggtagatcacaaggtcaggagatggagaccatcacggccaacatggtaaaccccgtctctaccaaatacaaaaattagctgggcctggtggtgtggcacacacctgtaatcccagctactcaggagcgtgaggcaggagaatcgcttgaacctgggaggaggaggttgcagtgagccaagatcgcgacactgccctccagcctgggtgacagagcgagactccatctcaaagaaaaaaaaaaaagaaagaagatcagacatttgacaaaatacaaacatgcataattatcagaagaaatggacatacaacaaaaacatctcacatacgaaaacatctcacatacgaaaatatttttaaccttgaaaccatgaattataacatgaaataacatgatatagtcatgaccaaacatgtctttcatatcaaaaattttaaacaattgtaataattgtaaatgagtttaattcatctagtaaaargggaaaaagtcagatagaaccacaaataaaaaataattcaataccataaaaacaaagacaaacctaaaactaatagattcagaaggacagaaaatgaagagaaaaaaagataaatgggcaaacctgtactaggctaatgcaaacgaaagtaattgttatcttaatttcaaatatggagaaaacgaaactactggggaaagggagggtccactgagaaccatcccagtaactcaaccacggctggtcttcgctggacaccatgaaycacactgtccaaaccttcttctctcctgtcaacagcggccagccccccaactatgagatgctcaaggaggagcacaaggtggctgtgctgggggtgccccacaaccctgctcccccaacgtccaccgtgatccacatccgcagcaagacctccgtgccccaccatgtcgtctggtccctgttcaacaccctcttcatgracccctgctgcctgggcttcatarcatttgcctactccgtgaagtctagggacaggaagatggttggcaacgtgactggggcccaggcctatgcctccaccaccaagtgcctgaacatctgggccctgattttgggcatcctcatgaccattctgctcatcatcatcccagtattaatcttccaagcccatmgatagatcaggagacatcactgaggccaggagatctacccatgacctgtatcctttgtactccaccttccattcctcgccctgctcccggagccaagtcctgtatcagccctttatcctcacacacttttttacgacggcattcaataaagtgtacgtgtttctggtaaaataaataaataaataaattcaaatatgactgagtttgggggaataagtgctaaataagacacagacactttatatgctaaaggttgaaattcacaaaaataacagttatgaatatctatttacaaataacatggcattgatataagcatagcccttaaagcaaaagttaaggtgttggaggccatgggctgttgaccccctaaaggtttgctaaaaaatcaccgacatgaagcagattgacgaatagaagaaaaagcgtacaaatttatttaacatgtatacacaggagccttcagaatgcggacccaatttcccaataagtaacagaagcttatataccaccttgaaattgcagaaacaatgcggactcagagtatgtccaaaaacaggatttagtggcaaggcaggttatgggaggaagaaaggaaggaagaggctttgctagcaatggtggccttgttgtacagagaagcctccctcagagggaatacatggtaaaagtttatttccacacctttaaaggtgccagactgccagtctctcctggatcgggaaaggaatagaaaagagaggcagggctgcattagtggagattctstacagatgcaaattttccccacaaaggacagctttgctaggccacttccgttttctgaccaaggggcagccatttcaaaatatgtcaaagaaatatatttggggctaaaatattttaatttccttcaaggtctacaacagaaaagtagagagaaatacattaatggtgggatactttaactcttctcaaaagtatgcagaaagccaaacaagggtatagtgaatttataattagtaaggtagatatatgtcaaattctgtgcttctgaaaacagaaaatacatatttttatatttccaataaaaaaaccttcaataaatttcaaaaagataaaacagtacagctgggcacactagctcaagcctgtaatcccagcactttgggaggccaaggcaggtggattgcctgaggtcaggagtttgagactagcctggccaacatggtgaaaccccgtctctactaagaatacaaaaattagccaggcaaagtagaaggcacctgtaatcccagctactccggaggcgaaggcaggagaattgtttgaacctgggaggtggaggttgcagggagccgagatagcaccactgcactccagtctgggtgacagagagagactctgtctcaaaaagagagaaaaaaaaaaaaaaaggataaaacagtacagacaactttatctagtaccaaggcaataaaactagaagacaataatataaggaggaaaccaaagcccctacgtatttggaaataaaatatcttggttttaaatagctctcgggcccaagaggaaaatccaaatgaaattgcagaccatctaaaaagtaatgataacaaaaatattgcacatcagactctatatgatactgctgaagcagtgttcaaacattgtattttaaatatctttattacaagttatgaacaatgaaataaatttctgaaattcttttctacacttatcttaaagaatattatatagaattactataatcacctgttgactccttccagcccactgcacagacaaaaatcgatttactgagacctcagcattgcagtagagaaaaatttgacacaaggccaggcacacagaagatggtgttactcctcaagtcagtttccttgaaggctcagagattagggtttttaatggacaatttggtgggcagggagctagggaatgggtactgctgagtgatcagggaggaaatcacaggggtgtggaaaatagtccttgtgcacttagtccacttctggtggagccacaggaccagctgagtcatgagtcacgagtccaggtggagtcagtctgagaaaatctcaaaaaaaaaaaaaaaaaaaaatctcaggttttacagtagtggtgttatctataggagcaattggagaagtcacaaatcctgtgacctctggccacaggactcctgagcaataagagattgtagaaactatgcctacattttagcagaactcaggcccctcccataaccctaatcttatggcctttcattagttttaaaaaggcagtttcagcccctgaacagggagggaattcattttagggaaggattattataatctttgcttcaaagccaaactatatatttttatttttgagacagagtctcactctgttgcccctgagctggagtgtagtggggcaatcttggctcactgcaacctctgcctcctgagttaaagcgattctcctgcctcagcctcccaagtagctgggattacaggcacccaccactgtacccggctcattttttgtattttttgtagagatggggtttcaccatgttggccaggctggtcttgaactcctgacctcaggtgatttccccgccttggcctcccaaagtgctgggattacaggcatgaaccaccgcacctggcccgaagttaaactattgacaactacattcctcccagagttagcttggtctgtgcccaggtatgaccaagaacagcttggaggtaagaagcaggatggagtcaattacatcagatttcttttactgtcataattttgcaggggcagcttcattacaaatgcagaacttagtaataaaagtcatattgttggctgggcgcagtggcttatgcctgtaatcccagcactttgggaggccgaggcggctggatcacgaggtcaggagttcgagaccatcctggctaacatggtgaaaccccgtctctactaaatgtacaaaaaattagccgggcgtgatggcgggtgcctgtagtcccagctacttgggaggctgaggcaggagaatggtgtgaacccgggagacggagcttgcagtgagccgagattgcaccactgcactccrgcctgggcgacagagcgagactccgtctcaaaaaaaaaaaaaagtcatattgttagatatgaattctaaacttgttttcaaagaatatgtcagtatgttcaattatttaccttctacttttaaacttcctcataaagcaacctttttcaattacctgctccaccctgactcattttgatcacctgctccaacctgactcatttcaatcacctgctccaacctgactcatttcaatcacctgctccaccctgacgcgttctgattacctgctccaccctgattcattcccattacctgctccaccttgactcattcccatgacctgctccaccctgactcattcccattacctgctctgtcataaccatttttcccgccaaaccactcaccccatcactctctttaaattggccaatcggaattagtttagcctgggcggtctaaccctagccaataggggaatgacacagcagcaggggccacctgaatcagggataagaaccccctccccttccttgtccaagtgtgtgctcaccattgctccatctgtaagggcgcacccttctatagaagtaccttgccttgctgagaattaaaaagaaaattttatattcgagtgctatttcttttgcggcactgaaactttatatataacaatattaataaacaaagcaaggccgggcgcagtgactcacgcctgtaatcccagcactttgggaggccgaggtgggtggatcacgaggtcaggagatcgagaccatcctggctaacatggtgaaacgccgtctctactaaaaaaatacaaaaaaattagccgggcgtggtgacgggcgcctgtagtcccagctactcgggagctgaggcagaagaatggcgtgaacccgggaggcggagcttgcagtgagccgagatcacgccactgcactccagcctgggcgacagagcgagactctatctcaaaaaaaaaaaaaaaaaaaagaaacaaagcaaaaaatttgactgggcatggtggcacacgcctgtaattccagcatttggggaagccgaggcgggtaaattgcttgagcccaggagtttgagagcaacctgggcaacatggcgaaaccctgtctctacaaaaaaattagcctggcgtggtggcaagcgcaggtagaaccagctactgggaaggctaaggtggaagaatcacgtgagcctgggaagttgaggctgcagtgagccatgattgcaccactacactccagcttaggtgacagagcaagactctgtctcaaaaaaaaaaaaaaaaaaaggaagaaacaaaacaaaaaatgtaaaaataaatactttaataatatgccataatgacatgtatactgatccggatttgtatctagggattgtactgtgggagtccaaaaacctgctgcatrtgtaaaatagttatactatttaatragcaaaagtcactagcagcaaaattatccaaaaatcagtggagttctaggaataaagtatctcttgtggtgccaaagcaaaaatgcaagtctagacctcagcaaggcaagactttatcaaaggaggctatgacaataggaagacactcaaagcctaagctagaaacctctcagggaagggrtgtgtgagcagaaactgtggcaaaggcagctgtggaaagagaaaagagaaaagggtgtattcagtttgctaggggaagtcttgaacttaatgaactgtgtcaaaaaagaaaaggaaggacaaggcagcacagtttagttggtggataggtatatggagtggggtttgggtctgagagagagcaaacaagttacaatgcagaaagtttgcataaagctgagggcctagctgtccttgtcaaagcagactgaagttacatgaagcactaagtttaaccatccctgttactggctatctgtgcacacttaaatgattttggcttttaagcagatataaattgcatatattccaagtcatgttgacacaaacgtatcttagaatctggctctacaaatattcaaagtaggtcacatccacaggtgaacaaatcgtaaggcagctggaaaacttcactgtattagttaataagagaataggccaggtgcagtggctcactcctataatcccagcactttgggaggccaaggtgggtaaatcacttgaggtcaggagctcaagatcagcctggccaacatggtgaaatcttgtctctactaaaaaagtaggtgaggaccgggcacggtggcttatgcctgtaatcccagcactttgggaggctgaggtgggtggatcacgcagtaaggagatggagaccatcctggctaacatgctgaaaccccgcctctactaaaaatacaaaaattagccaggcatggtggcacatgcctctaatcccagctactcaggaggctgaggcaggagaatcgcttgaacgcgggaggcagagcttgcagtgagccgagatcgtgccactgcactccagcctgggcgacagaggagactctgtctcaaaaaaacaaacaaacaaacaaacaaaaaacagctggacatggtggcaggcacctgtaatccccgttactcacaagtctgaggcaggaaaatcacttgaacccaggagacggagattgcagtgagccaagatcgtgccactgcactccagagcgagactccatcaagaaagaaagaagatgaaggaaggaaggaaggaaggaagtaaggaaggaaagaaagaaggaaggaagggaaagaaagaaagaaggaaagcatcaaaatgaatgaagttaaagatcagccaaacaaagctaagaaagcaaagaaattgaaaaaataaaaatagaaactacttaattagaaaaaaagtagaattaaatatataatccaagagctggttacttgaaaaataaaaaagataggcttttagctaagttaactaggaaaaacagctaaaatatacttkatgcaataatttggaaattctagataaaatggattatttttaaagaaagtatgacttgccaaaactgatcttaaaaaaaaaaacagaaaatctaaataagcaaataattaccataaaagaagtataaagagctattccacaaaaggagtaccaggtctagatattttcataggtggttatattccacctttaaggaaacaattccaaagctatgtgagcttttctaacacataaaaaaaagaaagaaaccatctaaaatacttctatgaagcaagaatagtttgacactaactctaacaaggtgtgtagaaaaaaacctgagcactaatctcatttatatgtattgatgaaataatactaggtactaggaaaaagaatcctgtaataccttamaagaatgaaaggacaaaaatggggattatttcagaaatacaaggataataaattattaggaaatctattttataaagagacccaaggacaatcaactcaacagactttgaaaaataatttgattaaaagcttttgggaggccaaggtgggcagatcatgagatcaggagattgagaccatcctggctaacacagtgaaaccctgtctctactgaaaatacaaaaaattagccaggcgtggtggcaggcacctgtagtcccagctactctggaggctgaggcaggagaatgacgtgaacctggaaggtggaggttgcagtgagctgagatcacaccactgcactccagcctgagcgacagagtgagattccatctcaaaaaaaaaaaacaaaaaaaaaaccttttaacatttatttatttatttatttatttatttagacagagtctcgctttttcacccaggctagagtgcagtggtgcgatctcagctcagctcactgcaacctcagcctcttgggttcaagtgattctcctgcctcagtgtcccaagtagctgggattataggcatgcatcaccatgccttgctaatttttgtatttttaatggagatggggtttcaccatgttggccaggctggtctcgaactcctgacctcaagtgatccatctgcctcrgcctcccaaaatgctgggattatagatgtgaaccacagtgcctggcccatctacttttcaatcaaaaatgatcataaaagaataagaatataagttgacagcaagaatgaggaaataaaaaatttttttaattaaatttgaaaaataaaaaaaaagaatagaagacatttccttaatatgaatctattttaacctcaagacagcttatgttcaaaggaaaatattagaagtactcccattaacaaaagattttaaataatgatgactactattatcagtaatatttttctatctaatgtgtttatctttatatttgggggaaaattagaagttaaaagttattggaaacaagacaacaatgcctgctgtcatcacttgcattcaaaattgaactggaagttctagccaaggcaattaggcaagaaaataaaataaaaggcatctaggttggaaaagaggagggacaactatctttttttgcagatgagataaaaatccctaaacaattcacaaaaaatccattagggctaataaacaagctcagaatggtgcaacaatgcaagatcaatatacaaaaatcagttgtatttctataaagtaacartgaacaatccaaaaataaaattaagaaaataattccatttataataccatcaaatataataaaatactttgcaacaaatttaacaaaagaagtggatgactcagccaggcaaggtggctcacacctgtaatcccagcactttgggaggccgaggcaggcagatcatgaggtcaggagttcgagaccagcctggccaacatagtgaaacctcatctctactaaaaatacaaaaaaattagctgggtgtggtggcgggcacctgtaatcccagctactcgggaggctgaggcaggagaattgcttgaacccgggaggtggaggttgcagtgagctgagatcgtgccattgccctccagcccaggcaacagtgtgagactccgtctcaaaaaaaaaaaaaaaaagaaacaaacaaacaaaagaaatggatgactcatactgaaaaagagatcattgaaagagatgactcaggaggctgaggcaggaggatcaggagtttgagtttgtagttagctatgatcgcgccactgtactccagcctgggtgacagagcaagatcctactgaaaaccaaaaagagaagcaagaaaaagagaaaaagaaagaagactagttgaaacaacatctgttttcatggattggaatatctaatattgttaagatatcagtacttcttaaattaatctgcagactcaacacaatccctgtcaaaattccaacagcatttttaattttttcagaaatgtaaaagctgatcctcaaatacatatagaactgcaaggggccctgaataaccaaaacaatcttgaaaaagttaaaaattgaaagactcacacctccccatttcaaaactttgcttaaagctataatatcaagactgtagtatgggcatargaatagacatgtagttgaggacaatgaattgagagtccagaaataaacccagactcttgcatcaattgattttcaacaaggctgccaagacagttcaatggaggaaagaataatctttcaacaaatggttctgaacaactagatatctacatacaaaataatgaatttggcacctgagtaccayacactatatacaaaaattaactcaaaatggatcaggacctaaacataagagctaaaattataaactcttagaagaaaacatagatgtaaatccctgtgaccttggattaggtaatgtttttttagttatggcaccaaaaacacaaactataaaagaaaaaaatagaaaaattgatctactccaaaattaaacactttagtgctacaaaggacattatccagaaactgaaaagacaacctatagaaaaggataaaatatttgcaagtcattctagtaaagaacttgaattggccgggcatggtggctcacgcctgtaatcccagcactttgggaggccgaggcaggtggatcacaaggtcaggagatagagacaagcctggctaacaccgtgaaaccccgtctctattatgaatacaaaaaattagccgggcgtggtggcgcatgcctgtagtcccagctactcgggaggctgaggcaggagaatggcgtgaacccgggaggcggagcttgcagtgagccaagatcgtgccactgcactccagcctgggggacagagtaagactccgtctcaaaaaaaaagaacttgtatctagaatatataaaaaactctaacaatcgagcaataaaagtgctgaacaaactgtgcctttgttcagaaacagnnnnnnnnnnnnnnnnnnnnnnnnnnnnnnnnnnnnnnnnnnnnnnnnnnnnnnnnnnnnnnnnnnnnnnnnnnnnnnnnnnnnnnnnnnnnnnnnnnnnnnnnnnnnnnnnnnnnnnnnnnnnnnnnnnnnnnnnnnnnnnnnnnnnnnnnnnnnnnnnnnnnnnnnnnnnnnnnnnnnnnnnnnnnnnnnnnnnnnnnnnnnnnnnnnnnnnnnnnnnnnnnnnnnnnnnnnnnnnnnnnnnnnnnnnnnnnnnnnnnnnnnnnnnnnnnnnnnnnnnnnnnnnnnnnnnnnnnnnnnnnnnnnnnnnnnnnnnnnnnnnnnnnnnnnnnnnnnnnnnnnnnnnnnnnnnnnnnnnnnnnnnnnnnnnnnnnnnnnnnnnnnnnnnnnnnnnnnnnnnnnnnnnnnnnnnnnnnnnnnnnnnnnnnnnnnnnnnnnnnnnnnnnnnnnnnnnnnnnnnnnnnnnnnnnnnnnnnnnnnnnnnnnnnnnnnnnnnnnnnnnnnnnnnnnnnnnnnnnnnnnnnnnnnnnnnnnnnnnnnnntagcccaggctggagtgcagtggtgtgatcccatctcagctcactgcaacctccgcctcccgggttcaagcaattctcatgcctcagcctcctgaatagctggaactacaggcatgtgccacgatgcccagctattttttaaatttttagtagagacaggatttcaccatgttggccgatctggtctcaaactcccaacctcaagcgatctacccgccttagcctcccaaagtgctgagattacaagtgtgagccactgggcccagccgtataataattttttaaaacaattacaggtgttgatgaggttgtggagaaataggaacccatggaaattgctggtagaaatatgaaatggtagtaaaaaaacagtttgggagttcctttaaaaggtaaacctagaggccgggtgtggtggctcacgcctgtaatcccagcacttcgggaggctgaggcaggtggatcatgaggccacacggtgaaaccccatctctactaaaaatacagaaaccaaattagctgggcgtggtggcaggcacctgtagtcccagctacttggaaggctgaggcgggagaatggcgagaaaccaggaggtggagcttgcagtgagccgagatcgcgccactgcattccagcctgagcaacagagggagactccgtctcaaaaacaaacaaaaaaaaaacttaaacctagaattactaatatgatgagcaatttcactccttggtacgtaccttagggaattgaaaacatatgttcatataagatagcaaaaaaaggaaacaactgaaatgttaatcaactgatgartggataaacaaaatgtggtatatccataaaatcgagtattatttagtcataaaaaggaatgaagtatgaaagatgctaaaacatagatgaacctcaaaaacattgtactcactgaaagaagctatatacaaaaagcttccctttttataggaaatgtccaaaataggtaaatccacagagacaaactatagactagtggctgccagagcttagggggaaksaaggatgaggagtgactaataatggctacggagtttcactttgggatgataaaaatgttttgaaactagtggtgatggttgtacaaccttgtgactacactaaaaatcactgacctacacactttaaaatggtgaaatttatttgtgcttgaattatrtctcaaaaatatggttaagttttaagtttattataacagaattaaacttttagaaaagggaaaaaatggttttacagggaaaggatgtggtaattttataaattatttctagatgataggattatatacatggaaaaacctgagagaaaaacacaaaattttatagatcataagagaattcaggtggactagcatgacattaacagtcaaaatcaatcattttcatatatacaaacaataagcagttcaaaaacatctatttacaatagcaacagaaaaataatttctgggaataatctaacaataaatgtgcaaaatctaaacgaagaaaactttaaactcgctactaaaggaaataaaagatggtttgcagccaggcgtggtggctcacacctgtaatctcaacactttgggaggccaacgtgggtggatcacttgagctcagaagtttgggaccagcctggccaacatggtgaaaccctgtctctacaaaaaatacaaaaattagccgggcgttactggcttgagcctttagtcccagctactcatgaggctgaggtggaaggatggcttcagaccagaaagcagatgttgcagtaagccaagcctgtgccactgcactccagtctgggcaacagagccagactgtctcaaaaaaagagaaggtttgaacaaatraaaaggcataacttgataatataggatgcttcaacatgataaaacttcaattctttctaaattaatttataataactcctctcccaaattctaaggatttttttwaaaaaaagacaggctgatttgaaagttcaaacagaaaaaaataaaaattcaacgtacgtttgatgaagaagggaaatgatagaaaactagtcaaaacgaagaggaaagcctaaattgacatttgtacaaagctatttattaaaatcttctttgtaattaagaaaacagtctttgtatccattcaagaattctctgcagctatgaaaaagaatgaagctgttctttgtctactgatatggaaagtgtcctaggccaggtatggtggttcatgcctgtaatcccagcactttgggaggctaaggcaggcagaatactggaggtcagaaattcaagaccagcctggccaacatggtaaaaccccacctctactaaaaattaaaagaaagaggaggggagggagagaaagaggctgggtgcggtgggtggcttacacctgtaatcccagcacttcaggaggccaaggcgggcagatcacttgaggtcaggaatttgagaccagcctggccaacatagtgaaaccccatctctactaaaaatccaaaaaaaaaaaaaaattagccaggcatggtggtgtgtgcctgtaatcccagctacttgggaggcggaggctggagaatcacttgaacccaggaggcagagattgcagtgagccgagatcacaccattgcactccaggctgagcaacagcaagactccatctcaacaaaaaaaaaaaagagagagagagagagagtcctagacaagagagagaaagagagaaaatgaaagaaagagagagagaaggaaggaaggaaggaaggaagaaaggaaggaaggaaggaaggagggagggagggagggagagagggagagggaaggaaggaaggaaggaagggagggagggagggagggagagagaaggaaggaaggagagaaggaaggaaggaaaaaaaagaaagagtcctagatgagagagagagagagtcctagatgagagacagtgaaagcaagaaagaaagaaaggaagagagaaagaaagagtcctagatgagagagagagagagaaagagagaagggaagggagggagggagggaggagagtcctagaccagkggtccccaatcctactggtctgtggcttgtcaggaagtggaccccacagcaggtggtgagcagtgagcaagcaagcagagcttcatctgtatttacagctgctccccatcactcacattaccacctgagctccaccttctgtcagatcagcggtggcactagattatcataggagcatgaaccctatcrtgaccagagcattcaggaatctaggttgagtgtccttatgagaatctaatgcccgatgatctgttactgtctcccatcacccccatatgggaccatcttattgcaggaaaacaagctcagggctcccactgattccacattatggcaagttgtataattgtttcattatatattacaatataataatgatagaaataaagtgcacaataaatgtaatgcgcttgaatcatcctgaaaccatccctccccaccctgattcatggaaaattgtcttccacaaaaccagtccctagtgtcaaaaaagtaggagaccattgtcctagatatactgtttcatggaacaagtaaggtgcagaaaagtgtatagcttatgttgcttgtgtaaaaaagagcaaaatgggccgggtgtggtggctcatgcctgtaatcctagcactttggcaggccaagacgggcagatcaygaggtcaggagatcragaccatcctggctgacacggtgaaaccccatctctactaaaaatacaaaaaattagccaggcatggtggcatgcacctgtggtcccagctactcgggaggctgaggcaggagaatggcgtgaacccaggaggtggaggttgcagtgagctgagatcgtgccactgcactccagcctgggtgacaaagcaagactccgtctcaaaaaaaaaaaaaaaaaggcggggggcaaaatgtgtgtgtatttgtgtatgtgtgtgtgttttcttgtatactgtaaaatatctctgtaaggggatacacatgctgatcaatactggcttaggggatgtggttagggggagaccttatactgtttatctttaacctttttcaattttgagtcttatgaaagtcacatctaatttaaaagtaaataatggaccgggtacagtggctcacacttgtaatcccacactttgggaggccaagaggggaggattgctctagcccaggagttcaagacaaccctggacaacatggtaagatcctatctctacaaaaaattttaaaattagcagggcatggtggcacactcctgaggttccaggtattcaggaggctgaggtgagaggatagagtgaacttgggaggtcaaggctgcagtgaaccatgatctcaccactgtactccagcctgggcaagagtgagaccctgtctcaaaaaaataaaaataaatgatacactgaaaatatagcagaatttctgtaaaaaaaattttttttgagatggagtctcactctgttggagtgcagtggtgtgatcttagctcactgcaagctccacctcccaggttcacaccattctcctgcctcagcctcccgagtagctgggactacaggtacccaccaccacgctcagctaattttttgtatttttagtagagatggggtttcactgtgttagccaggatggtcttggtctcctgacctcgtgatccacccacctcggcctcccaaagtgctgggattacaggcatgagccaccgcacccagccaaaaataattcttaatcttaatttcacattgataaaatgtatttgaacaaaattattatacttctttatttttttcctctgaaatggccaaactctcttgactacttgatagaccaccagctgactattctttgagcaaggctgtcccagaactttaaacattcagatgccagagaggctactacagttggatccagtatctgaacccacatctctttaggaccacaaattgtattcttataccagagattaagtgggatcttattagagaaattcctaattcttaattcaattagtcagtatttgctggaaacctattatttaatattatctgttatacagagattagtgtatcctggctgctgttctcaagaagctcacaagcatgctgaagttactaaactatatccaattacataaaataggttctaaaggccccagcaactatggcagttggttaaaatagatttattataacaccccgtgcctaagtatacatctgaaaggatacacacaactttttatttttattttatttttttgagacagggtctcactctgtcgaccaggctggggtgcagtggtgcaatgtcagctccctgcagcctccaccttctgggtttaagcaattctcctgcctcagcctcctcagtagctgggactacaggtgtgtgccaccacgcctggctagaattattaatagcaattacatctgttggatgggattgctagaaaggagacaaggggaagacttttacttttttaaatatttcaaatatgaagatggtgggatcatgaaggattttattcatttttagcatttttgtttttcaaataaaaacataggaaaaaatcaagagtttcaaaccaatacataaagttatttcttcacataattaaaacaaattatcatataccactttcctacctcccttcattgaatagtacaaaacttggtactctgcttttatctactagatattctgtatttgccttgacccttgttaaatgaagtctccctttgtttaggaaaaatatacagtatatcaaaggatgagatcaccaacccaaagctatgctgattagtcttgttgaacaaagaaaatacaggctttggctgggtatggtggctcatgcctgtaatcccagcactttgggaggctgaggcaggtggatcaygaggtcaggagatcgataccatcctggctaacacggtgaaaccccatctctactaaaaatacaaaaaaattaactgagtctggtggcgggcacctgtagtcccagctactcaggaggctgaggcaggagaatggcgtgaacccaggaggtagagcttgcagtgagccgagattgcaccactgcactccagcctgggcaacagagcgagactccgtctcaaaaaacatataggctttatgggaagggtttgttatggggtgtattggttactgaggcaggagtagtttggaaaatcagtcataaaagcatgggttacagaagttcattttctgttacctagatgtgtttgctgaaggagctatcactgatcaattacaacaggtttaaaacaagcattggtgtttagttggtaccatgctataaaaatttcagtctcggctgggcacagtggctcacacctgtaatcccagtactttgggaggctgtggcgggtggatcacctgaggtcaggagttcaaaaccagcctggccaacatggtgaaaccccgtctctaccaaaaaatactaaaattacctgggcatggtggtacatgcctgtagtcccagcaactcgggaggctgaagcaggagaatcgcttgaacccaggaggcggaggttgcagtgagcccagatcacgccactgtactccagcctaggtgacagagtgagactctgtttaaaaaaaaaaaaaatcagtctttttctaggtttgtggggattttttttaaattctaaaaacgaaggccggtcgcggtggctcacgcctataatcccagcactttgggaggccaaggtgggcggatcatgaggtcaggagatcgagaccatcctggctaacacrgtgaaaccccatctctactaaaaacacaaaaaaattagccaggtgtggtggtaggcgcctgtagtcccagctacttgggaggctgaggcaggagaatggcgtgaacccgggaggtggagcttgcagtgagctgagatagcaccactgcactccagcctgggcaacagagtgagactccatctcaaaaaaaaaaaaaaaaaaaaaaagttccatctttttttgcttggtcttgattttaaaaactagaggaatcttgcactgaaaattttaatttcttttgacctatcataattttatattaaaaggtcataatatagtgtattaattttctcttccgctgtaacaaattaccacaaatttagtcacttaacacaatacaaatttatcatcttatgattcagtatattagaaatctgacacaggtctcactagactaaaaaccaagatactggaagagctgaattccttcttgaggctctagggaagaatctgtttcctttctttttccagcttctagaggttacccacattccttggctcacagccccttttctccttcttcaaagcgagcaacaaacgtttctctgaccctacttctgttgtcatatctctttctctgacaaccccttcgtcctccctctttcagttgtaaggacctttacaattaycttgagcctgcctggaggatcaaggatactcttcctaccttgagggccttaatttagtcacacctgcaaaatccctcttgccatgtaagttaacatatttgcaggtcacaaggattaggacacgaacatgtttaggggacctttattcttcctaccacacgtggaaattgaatttataaatatatccgttagaattgcacttgaccgcttaaacaagtaagggatctctctgtctcctatagcaggaaatctgggaacgggaagctcaaggctgattgtgatggcctcaacaatgccagcaaggaaactgacccctagtgtcctgatcactaccatgcttagcaatgactgctgagcctcaggcatcctcaccggttccaggcaggaaaaaagaaatggaagaggcagtaccagcaaaattcagcttacattttgttagccagaattgagtcatgggaccacccctagctacaaggaaatctgagaagggaagtttttagctttcctccttctctaaagaaggaaggaaaattgaaataagagttggaatgagtgacaggtgagctaacctacagaattgactacaagtaagtgattgaacaaacaactttaataatccaattattgaagggcaggactcaggtgtaggaatttagtggactatttgctatacatgttactcaatatctgttagtcctaagatcaaaattgatttttaaaaaaaagactcacaagtcacagtttacttagccttaaaaggtacacggtaaacaatgcacacagctaaacagcagagaccttctgatgtctggcaatgctgggtgcagcttccatgcccctccaccacacagcatgctcagctgcaagaggtgaggctgaagcgygtgcagaagacttgacctctgggcagccaccctttccattctctacctatgtgtagtccatgcttgctgcatagcctctgggagaaagtgctaaatcacatgcctaacagggcagctgcaactcatcaatcaggggtttcacaatgaatgcttctgtaagccaggggcaatctgacctgctaacattccaagtttatcttgtatcaatacattctggggagcagagtggcaagaaggtaaatctaaggtcatatccccagggtccctgggtctggggcaaaagtttagaccagccaaaaattccttccttggtgggctaatatatttatctttctttcttcctcttgaattcagagtatctttcttcctcttgaattcagagtatctttcttcctcttgaattcagaatcaattgagagaaatacaggagtcaggataagtgagcatcaaaatatcaccttaataaagtcaactggaagatgtggccaagtgggcaggctcacactttccccagacatccccgcctggttgctggcacagctgaacaacacaggcttctcagcaaaggcagggtcataggaagcagatccactccctgtaacacacaggtctagaaaggtggaggaagggctgagctcagtctgttcttactaactcacatgtctgactgctcactcctatttccctggggaggggcgaatgaggaacagggagatactcagtgattctcagccaatctcacagttcaaagccacccagggaaccaatgtgcagtgaggtagaaagccactcacctacctgaagttgctgcatctggaaacataagagatggagatactgttcttccccataactcagaagattcattttaactacgctctacttttctcataaatggcaaatttcctctgagatagtttcctttttttatttttatttttgagatggagtcttgctctgtcgcccaggctggagtgcaatggcacgatctcagctcattgcaacctccgcctcctgggttcaagcagttctcctgcctcagcctcccgagtagctgggattacaggtgcctgccaccacgcctggctaattttttgtatttttagtagagagagggtatcatcgtgttagccaggatggtctccatctcctgaccttgtgatctgcccgcctcagcctcccaaagtgctgggattacaggcatgagccatcgygcccggcctttcaattcttttaatacaaagcaaatgaaaacacctgttttcaatttcttttaccagtcaggctatcttttggaacctaagacagtttgcctctaggtttctgctagcactcttgtttgagggcattccctggagtcataaagggcagttctttgggaagaagggatgggaagaaaaaataatgtcagttcataaaataatcttcagacattcttatttataaatgccatcatcaatagagttttcatttttcctttgctcaacaaaaagctatcaagtatcttgagtagctgttttttgttttttgttttaatagttatgacagggaccagcacggtggctcaagcctgtaatcccagcactttgggaggctgaggtgggcagatcgcctgaggtcgggagttcgagaccagcctggccaacatggagaaaccctgtctctactaaaaatacaaaatttagccagatttggtgttgcatgcctgtcatcccagctacttgggaggctaaggcaggagaactgcttgaacccggtaggcggaggttgaaatgagctgagattgtgccattgcactccagcctgggcgacagagcaagacatcccagctacttgggagtctgtggcaggagaattgcttgactcgggaggcaaagattgcagtaagctgagatcacaccactgcactccagcctgggagtcggagggagactctgtcccagatttaaaaaaaaaaaaaaaaaaaggctatggtaatgacctgtctccctcttgcttaagttytttctttctttctttctttctttctttctttctttctttctttctttctttctttctttctttcttttttaatctatctttctttctttctytctctctctctctctttatatttttattttccagagtctccaacccaggttggagtgcagtggtgtgattatagctcactgcagcctcaacctcctgggatcgggatcaagggatgctcccacctcagcttcccgaggagctggaactacaggtgcacaccaccatgcccagctaattttttattttttatagagacgggggtctccctatgttgcccaggctagtcttcaactcctgggctcaagcaatcctccagcctcmgcttcccaaagcgttgggattacagatgtaaaccactgcacctggcctgagttttcagtaaaccaaataattaatgtaattctgactgtattagaacctaaagcacattttctggctatgggtccccaagcagagcaggaggcctgaccagttcatggattccctgcaccgggtctggcagaaagtcacagaactcgttgtattaggtctcccctcaggtacttgaagatacagtcttcatatctcttcaatattccaggggaggggaccctacttgttttcaagatactgacttttcatgttaatagcaatgctcccatagatattatattgcatcccagaacttttcaaatctgtagttccacctaaaattttatctagtgaattgttacttactgcctaggtgccaaccagtacagcagtgcgtcttcatcttacttagacttcagagcctcccactggctgtaatggatgagcatgcacccaagctccccttccaccactctgcttgctggcatatgagagtgctctcctctgcagggtcctgaatcttgattctcattggctactaatatgtaatggcttttgctcagtgctgttgtgacaatcaccctgttggccttctgtgtctaggaagaattacagtcactaccctaacgagctcagagtctcaatttgcagaaggcctgtcattgaacataaaatgaattttgagccattgagaagactttctgcttttcttgagccagtggttgaacagtgtaatcccaggtgtgcctgtaatccttggtctttgggaggccaaggcgagaggatcacttaaggccaggagtttgagaccagcctgggcaacatgggaaaaccccatctctaccaaaaatacaaaaaaaattagctgggcgtggtggcgcacagctgtagtcccagctattcaggaggctgagatggaaggatggtttgagcccaagaggcagacattgcagcgagcttagattgtgtcactgcactccagtcagggcaacaaagccagaccccgtctcataaaaatggctgggcatagtgggtcatgcctataatcctagcactttgagagactaaggcaggaggattgcttgaggccagtagttagagacctgtgtggctaacttagtgagaccctgtctgttttgttttttttttttttggagacagagtcttgccttgtcacccaggctggagtgcagcggtgggatcttggctcactgcaacctttgcctcctgagttcaagtgattctcctgcctcagcctcctgaggggctgggactacaggtgtataccaccactcccagctaatttttgtatttttagtaaagatggtgtgtcaccatgttggccaggctggtcttgaactactgacctcaggggaccttcccaccttggcctcccaaagtgttgggattacaggcatgagccaccatgcccggctcccatctgtattttcaaaaaaaataaataaataaatgacagtatggcctattctattctattctattctattctattctattctattctattcatttgagacagggtcttgctctgtcgcccagactggaatgcagtggcgtgaacatacctcactgcagcctcaatctcctgggtataagtgatcctcctatctcagcctctagagtagctggaactataggcatgtcccaccgtgccgggctaatttaatttaaaaactttttttacacagacagggtctcgctatatttcccaggctggtctcaaacttctgggctaaagcctcagcctcccaaagtgctgggattatargagtgagccactgtacctggctctattttatttatttatttatttattttattttatttattattatttttttttgagatggagtctggctctgtcatccaggctggagtgcagtggtgcgatctcagctcactacaagctcygccacccaggttcacgccattctgctgcctcagccttccgagtagctgagactacaggcgcctgctaccaygcccagctaattttttgtatttttagtacagacggggtttcaccatgttggtctggctggtcttgatctcctgacctcgtgatcctcctgcctcggcctcccaaagtgctgggattacagacatgagccaccgcgcccggccctggttctattttaaataaataaatacatgaaactaaaacacaattggaactttatttgctctttgatgacccttcatagcacctcaatttctcatggcatgcctcttgcttggtttacatcatagaatttctggcataataggccgggcatggtggcttacgcctgtaatcctagcacgttgggaggccraggcgggtgggtcacctgaggtcaggagttcgagaccagcctggccaacatggtgaaaccccaactctactaaaaatacaaaaattagccaggagtggtggtgggcacctgtagtcccagctacttgggaagctgaggcaggagaattgcttgaacctgggcacagaggttgcagtaagccaagatcaygccacttcactccagcctgggcaaaagggcgaaactccatctcaaaaaatataataataatttctggcataatctcagaagattcggccaggcataatggctcactcctgtaatcccagcattttgggaggccgaggcaggcgaatcacttgaggtcaggagttcgagtccagcctggccaacatggtgaaacaatgtctcaaaaagagggagactctgtctcaaaaaaaaaaaaaaatctcagaagattcttagaaatttcttaccactgttaaaagaaaaaaacttcagctgagttaaatgtaaagaagtttagctaaacaatgaacaatttgcgaatagggcaacccccagaatcacagcagattcgtagtgaatccagcgtagctacctggtggaagaagatttatggacagcaaaatgaaagtgacgaacagaaaacagaagtgaagtacagaaacaactggattggttacagcttggcatttgccttacttgaacacagtttgaacatttggctacatttgattggccaaaactcagtgattggcacggatgtgggctgtatacctccactttttacagttcatgatgtacagaaaaacctgtaggccaaacttaaacatgtgagaaggcagctttaagctaaacttgatttaaacccaccttgtctcagttctcctggtttccaaattatcttctggcctcattttcttccctagctcagaaatatagtgactatccatcactatttccagcattaacgccttcaaatctcttagtcttctgtttcacttgtgctataatcatccagacgacaacagacctagctaaagaacatataacattaggtttcacatctgacaaatatgtgatctgcagtggacatatgctcatttttgctcaccattatccagcctcctttctttggcaaaaccatcttaatctgcaccatgctgtattccagtcttggaggcagctccccaactaagaatatgmctctagctaagccagacagtgtctccccaccatcccctctctctggaattggactctggggtggagtgatccaaagatattaagcaatatacaggcagctatgtcctaaataatcaatctattcatttctactactgaggcctgtgaaatgctttggttttgttttttacatattggttcattaacctccccctttgttttgcccctcttgtttccacatatttttccaatgaaatcccttttatcttgtgataaaagtgatttgctgttgtttgcaactacaaaaccctaactagcggtggcagcttgtattagtgatttaaatcctgcataatcaggaaaattatatttacatattaagatgtcatgaggagcaaatgtgaaaagaaactcaaggggtctagtatgcaatagccacaataaatccatgccctctaaaatcaggtgaacctccaacacagcttggcagtctttttatttggtctgggccatctgcttcaccaaatcccctcggagggttttacaaacatttacaattttcttcaggctgcccactctatctctacctcaatctcaacagcctgtctggaatgttacaggtgaacatcaaggagatagagataccatgtttgcagaatctcagaaggcttttttgatcttgtgattcatgccagggtcatgatgtcttaaaactaggtttgcaagaatacacttttgaaaaaacacattaggacattgattagaatcgccttaccaatacctgcatcctataagtgttttgcaatactcasagtggctcagtggagtgagtgaggttgtaatccgagctgctactgaaattcttctttataatttgatagtgttggacttgaaggtcccatctggttacacagtaatttaccactttactgtgggttctggtaygccaaagaaggcagtactctccagtctttgtttaaacaactctaggatcagaatgttcctggtttgtcctggtaccagagacactgtttgaaattgtttgtgtcttcttttcagtcaatcattcaaacgttcaaacatcgagattacatgcatctacaaaaaatgtatgtatgtcttaattatgaaagcattctcaacataccaaactacaaacatatcagccataaatttctgcaatctcaatatatataaagtagcactatgagatgaaagaatgttgatcaacttgaaaagatagttttggggtatccagaaccaaagcctccaacctttctcattgatttctggataaggaggcctcctttatgtattttttctttttaccctctttctttcccttccttcctccctgcctttataaagctacctaaacaatctaggactagcattaagtttgttggacatggcatttttctcagtacaaatatttcaatttttcttcctgtttaaaaattaattttattatatttatttttaaatttatttatttatctatttgagatggattctcgctctgttgcccaggctggagtgcagtggtgcaatctcggctcactacaacctccacctcctgggttcaagctattctcctgcctcagcctcccgagtaattgggattacaggtgtaaaccaccatgtctggctaatattttgtatttttagtagaaatgggggggtctcaccatgttggccaagctggtcttgagctcctgacctcaagtgatccgcctgccttggcttcccaaagtgctgggattacaggtgtgagccaccatggctgtcccctgaatttttttttttttttttttttgagacgaagtctcgctcttgtcccctaggctggagcataatggcgcgatctcggctcactgcaatctccacctcctgggttcaagcgattctcctgtctcagcctccccaagtagctgggattacaggcacctgacaccacgcctggctaatttttgtatttttagtagagacggggtttcaccatgttggccaggttggtctcaaactcctgacctcaggtgatccgcctgcctcggactcccaaagtgctgggattacacgcctgagccaccgcgtcaggccgaaaatttttaacgtttagaaacccacgtttctagcagagcgtggtggcacacatctgtagtcccagcactttgactgggtgaggctggtggatcgcttgagcccargagcttgataccaacctgggcaatacagtgagacctcacctctatagttgaaagaaagaaaaaaagaagggcagggtagggcagcggaggggaggggaggggaaggcaggggaggggagggatgtttccttggatgaaatgtgtttcttcttgtggtccccgaccagttttaaactytagaactgtggcactactaactggcttctaggcagcctcttccacttagatgggtttgaagtacagaaatgatttcatcagcctgaccattgaggctctagagattcaagcatgtggagaagttctgagtgctcaatctcaatgccaatcatttyactggtgaaaataaggttcatagcttgaataagaggaaacatctatccacctgacatcaggttttgttcctgattaaggatacattttgatactggagtgctggaaagggaagattgtggtccctttaaacaatacaaaagggaggaagggaagtgctggatagagaaaggtgtggtccctgcctagggctccacccccacggacctaggtgaggacaggcatttccggcccaaatgttgcatttcccaagaccatcctggcctgccacgcccccatcctgggcctgtaaaaaccagagaccctggcaggcagacacagtggctggacattgtgaggaaggcgttggtggaagaagatgcaagtggctggtcgttgaaaggagcacaccaggagaaaagcatatcagcaggcaccagcataccagcaggcaccagcacgtcggcaggccatcgactggtgggacgccaccggcaggcgggaggaggtgcagtttggccgggacagtcggaggagagccagggctgcccagtggcccaactccaggggaagactatctcccttctggctcctccatcggctgagagctgctcccgctcagtaaaactttgcactcattttccaagtccacgtgtgatccgagtcttccactacaccaaggcaagaacccgggatacagaaagctctctgtccttgcaacaaggtagagggtctaattgagctggttaacacaagacggtaaactaaaagcatcctgtaacatgcccactggggcttcaggagccgtaaacattcacccctagacactgccgtggggtcggagccccacagcctgccygtctgtatgctcccctagaggtctgagcagccaggcactgaagaagtgagccacacccccattgcatgctctgcgagggggacagggaaactttaccgcttcaatatcgacttgcaagtgaaaacagtttctgatattgtatgtgtatgagcaggctactgctgcatgtagcttgtgattgggcctaatgatgttattccataattataatatttagtgcataattattgcattatatgcaaatgttgtactgcattatgaactcttgctcacagcacagttacatcatagaaatgtggggacaatagctgcaggatgtagagtgtctatgctagagacaccctgggggacacagctcttagaacttggtttcataacattggtttaggagaaatttaggtctgaaatctagagcattccagggaggagttggtcttgaacaatttgcgtaggagtggatttggtaaggttctgagtcttgggataggcaccatgaagtatctgaagaaggtgctggcagacagaagtggattatgaggctgggcgcagctcttttatattttctgcataaactggtaattagggtgagccttctgcttttatgatgagctaaaactataaataatggtttggtgcacatatcagtggcgtcctctgaaaaaaaagggaaacttttgctgtttccacattccatcttgcctttgccctagggattgtaccaaatagatgcaactcattttggagttacatactttttaaaatatttgttcgtttatttatttgtagagatggagtcaccctctgttgcccagactggtctggaactcctggcccgaagtgatcctcccacctcagcctccaaaagtgttaggattatagggatgagccaccacatccggcctggaatactgttattaaaaaatgtttctattcctaatcaaaagctcccagaagtaatcaatcccctcaaacagaaccaacacagctatcagttgggaaacctgtgggactttcagactcttgagcaaggaattggatataataatggaactaaaaaaagagaacaaatctaggaatttgcattttgaagtcatcagcatacagatggcagctaagggcaatgacatagaaaaagaaagggagagtgtttagaataagaaaaaagagatgaggactaaattgtcaaaaataccaacatttatagagagctaaaggaagaaggtcagcagtggataaaagccagggaagaatggtgtcacactagtcaaggcaaaagagagtcaaggaaaacaagaagtatagagtgaaacctcagaatatagtttcagagtatccagaaccaagataggagaactagtaaagaggaattagttaaactgtaagagcaagagggtaatggatgcagcaaagttcctgaagagatgggagaagatcataaagaatacaagggaagtttggtagtcagcctccaagatggccaccaatgatccttcctcctggtagtcatgcccttttgtcagcccctcccacaatggtctgagtgactaattgaatgtggcagaaatggcactatgtcatttctgagattaggttataaaatatactgtggcttctgtcttggtgactttcgcttgctttctctctcttccctgatcatttgctctgggggaagccagctgccatctgtggggaagcacatatggtgaggaactaaggcttcttgccaacaaccgtgtgagggagcttggaagggaatcctccagttcagttaagccttcagacaatggcagccctggttgacatctggctgtaactctcatgagacattctgagccagaaccactctgccatgttgctcccagattcctcaaatccgaaatggtgtgaggtaatagacatttgttgttttaagctgtgaagtctgggtaatttgttatatagaaatagataatacaggagggattggctttgaacaggaaggtagactgcttcctctgagaagttaccatgtagggtcatttttgtaaaatcttgttcttcaagtttaccctttattgcttaggcttggtatcttaaaatatttcaaattctaagttacaactagacttaagccatttttattgctcatcaaaaaatattttaggctggatgtagtggctcacgcctaacatcccagcacttagggaggctgaggtggaaggattgcttgaggccaggagttcaagactagcctgggcaacatagcaaaattccctctctccaaaatacatatatttatttaaatatatgtctttaaataaatatatgtttacatgaatgtatatatttatatataaatacatatataaaattagaatttcctactttttgtaacatcctcaaagttggctataatacctattttcttagctgatatccatttaatcattcatttgataaatatttattgtatgtgacattagtattaactttatagaaagcaatgytgcttttaaagtgattagtagggtgataaatgagctatttgctagtatatccaagttatctagtaagaagggtttactgagcaaagaagtatgggtaatagcataaaagtataaacaaatacccaaacagtatacatgagaagttaatcatcttgtcagaagaaaatgatacatacaaaaaacccaagcatgtgtgaagaacagtgtgagaatgtatccagccaaaattatattcaaagtaaaaatcatgtgtgcatgacgaactgtatagcatgagttaaaacaaatgaatacccctgatcacagaacaatgagaaattcctgcagcaagtgagcataactgccaaataggataatataaaagaagtatgaagggaaaactaattttgagcctgtaaccatgtggaactgaagctaattcttcaagttctgcttcaggttatcaggaactgtgctcccgtaatttaaccatttatgataagtacaagattttcacacagaaaaaattattctgctggtggaatgtgaactattacatcaaacttgtaaaattttctataattttcattatttatctcagactttgactcttgtattcttttgaagaaggacttgtgtggaaaccatggtgcaaagtttaaaataccaaatgcgcgttaaagaaattagagttgttagctaccttctgttctcctttgttgtattttgggttttactgggtactggagccgctgtaccacattgatagcctgaggtttgaccaggtcatggggctggacaaaggtggtgagttgatgaacagatccagctgtcagcacagcaaggagatccaatcctgtgggccaaggacagtcctcatggttttcaattaatcgtgtgtaagaaaaattgtactacttgaaagaccttgatttaaattcttgctttaccatttgataactctgtgatactgagcaagagactttacctctgtgagccttaatgtcttctccacaaaatagagctgaaaaaaatctgctgtaattacatcctgtttttcttcttaaaggtcaaatgagcctggcatcaaatatatgtgaagccattttttttttttagatggagtttcactcttgtccaggctggagtgcaatggcacgatcttggcttactgcaayctccacctccctggttcaagcaattcttctgcctcagcctcccgaatatctgggattacaggcatgcgccatcatgtccagctaattttgtatttttagtagatgcagggtttcaccatgttggtcagcctggtctcgaactcctgacctcaggwgatccactcgcctcagcctcccaaagtgctgggattataggcatgagccactgtgccaggcctatgtgaagccatcttttaaaactttacactgctataagcagaattttttcttttttcttttctttttttttttcttttttgagacagagtctcactctcacccaagctggagtgcagtggcgcgatcttggctcactgcaacctctgcctccttttcaagtgattctcatgtctcagcctccgccgcctgggttcacgccattctcccgcctcagcctcccgagtagctgggattacaggcatgcaccaccacacccagctaatttttatattttagtagagatgggatttcaccatgttggctaggctgatctggaactcctgacctcagatgatccaatcacctcagcctcctaaagtgctgggattacagatgtgagccaccatgcccggccttaaacagaataatactgttatcattccgttttgcttaaatctttatgttcttggcaaaagcttagataggctttaagctatgaatacaacttgggaagggctaacagctaattccaaaaaaagaggccgggcgcagtggctcacacctgtaatcccagcgtcttgggaagccgaggagggtagatcacgagatcagaagttcaagaccagcctggcagagatggtgaaaccccatctctactaaaaatacaaaaattagctgggcatggtggcaggtgcctgtaatcccagctacttgggaggctgaggcacagaattgcttgaacccggggggtggaggttgcagtgagccaagatcacgccactgcactccagcctgggcgacagagcgagactccatctcaaaaaaaaaaaaaaaggaaaaccatcttttctaaaaatcattaaaacaattgaagttagtttttgaataagaaaataatgcctaaaacaaatctgtatcactaggcaacattaaatctttatctcctcgagattacaaggactttctatttagtacacaaggaccaatttttccaaaaccaaaaagccaagcctgttagcacttactgtcacaaatggttaccacaaaaacaaaataatgaaggttgaatttatggtttctgtaaaagggaagcctctaggatctttaaaagtatttttttctatttttaaatataacattcattgtagaaagtttggaaacatagtacaagtayaaggaagaaaatttttataacttacaatcacattgctgaggataacattttgttaatgtttttgcatagttttttttccaatttttgtcttcctcttgtctgcttttttctcacattttttttattatgagcagtgccatagcattacataagcttttttcttttctttttttttttttgagacagagtctcactctgtcacccagtctggagtgcagtggcacaatctcrgctcactrcaagctccgccgcctgggttcacrccattctcccgcctcagcctcccgagtagctgggactacaggtgcccgccaccacatccggctaattttttgtatttttagtagagatgggatttcactgtgttagccaggatggtcccgatctcctgacctcatgatccgcccacctyggcctcccaaagtgctgggattacagaggtgagccactgctcccagcgcttttttctttttttttaagatggtgtctcactttattgcccaggctggagtgtagtggctcgatctctgctcactgcagcctctgcctcccrggttcaagtgattctcctgcctcagcctccccagtagctaggattacaggcgcccactaccaagcctggctaatttttgtatttttagtagagataaggtttcrccatgttggccaggttggtctcgaactcctgacctcaagtgatccgcctgcctcagcctcccaacatgcgtgagccaccrtgcccggccagcattacataagctttcaaaacatgatttttactatcctatcctaaaagtttttttttttttttttttttttgagactgagtctcactctgttgaccaggctggagtgcagtggtgcgatcttggctcactacaagctccgcctcrtgagttcacaccattctactgccttggcctcccgagtagctgggactacaggcatccrccaccacgcccagctgattttttgtgtttttggtagagacggggtttcaccatgttagccaggatggtctccatctcctgacctcatgatctgcctgcctcggcctcccaaagtgccgggattacaggcgtgagccaccacacccggtcaaaagattattttttaatctgaaattatttccaaggtaaatatttttcttccaggtrttttcctaaggacccaagttcaaaaccttgcattactctggtctccctttcttttttttttttttttgtcttatgagaaatcaagtctgaattgatttggttcagaatcaaacctgaatctgatcactaaattctactaattcttttctttctatgtctatccacatagttctggcccggccaggcccctgtttcctcagcccagattattgaagtacttttctgacttttttatttctttgtagcctcttttctctatggtaatctattttacatatctctttgcatcattaccttgacaaaaatattgactgcctctaccttatatggcagaggtcccaaacttgagctccaaggctgaacatagtctgcaaatttgtttttctacaactccacagtgctctgaccattatttttaaatttgctggaatcctttcaaagggccccaggtttcactgatttgtgttacctgcctggcgtctaggcttccaggtatggctgagtagactttgcttttttttttttttttttttctgagacagagtcttgctctgtctcccaggctggagtgcaatggcacgatctcggctcactgcaacctccacctcctgggttcaaacgattctcctgcctcagcctcctgagtagctgggatgacaggcgcatgccaccacgcccagctaatttttgtattttagtagagatggggtttcaccatgttggccaggctggtctcgaactcctgaccttgtgatctgcctgcctcggcctcccaaagtgctgggattgcaggcgagagccaccacgtccagccgactttgcattttataactccagagggcactgtgcacataacataaaaagttgtgcagtgcacagcctatacaatctgcacaactctacctggtggccctatgggagcctatggccatttagtgtgaactctagtctgtaaaacgaatatcatgcccactatrtcgactaatcaagcccatcctgtaccatagtctggaaaaggctgacattcctaaaagctttgcactctaagataagccacgaaaaccagaaatatttcaaaagctttgaattccaagataagccgtgaagttattttttatgcaaaagacagaaacatactgtttttctttttatcaagactgaccccaaagttatccaatcagaattgttgactaatatataacaatctgagctatctcctgactttgtgattttttttttttttagacagtcttgctcttgacacccaggctggagtgcaatggtgcgatttcggctcactgcaacctccacttcctgggttcaggcaattctcctgcctcagccttgacagtagctgggattacaggcgcccaccaccacatccagctaatttttgtatttttaatagagacrggatttcaccatgttatagttcaaatacttttttaaaaattagatgtgctagttctgtactaacttgtctttttttgcaagttaaaatgctagtcagttctcaaatttgtctgtgaattttgcaggatagagtataaaattccttaaatcctaattccaagctctttacaatgtgggccctacatccctaaagttttctcctttgcgtaaatactacacttgagacaaactaattgttttcccccaacataaactttatagttctcttctgttgcatttctactctccaatatttctgattcttttcctctctttttttttttttggataaacaagtttatttgtaaatttagtcaacatacataattgacctaaaaacttcaataagataaattttaaaaccacttggaaggccatctctataaaaatgattttcccaggacagtaaccagatgtaacctaacctaacaccatcttaaccrgcagaggttcagtgggctagagctttgtgctcctcccctacaccaagtttttataatacaaatgccacaagaaaaagaacttcagtactgtttcctcttagcagaggagaaaactcaacctagttatgagaccaaccacacaacacaatgaaaagctgcactagttcagaatattagttaacagatgatgctggtgtgaataactcatatttttttctagagcccttataaataaaatcccccagttagtgtttccattatcagctagagggttagttaacatgtggtagaatgaggatttatgcaaggtataaatgcacatagcattttactactatgagaacaagtgcagtcagaagaaaaccaactggactctaaattacacacaccttaatgacaagactccccaccacttgtgaatgtaaaacatttaatttgaaaatgttgacactacaatatataaaatagctattataaatgcacatattgtattctatagctgccaggtttaattttttttttttaaaggaaactataagttacactgtggttaaggtttgtatcttcacccttgaaaaagcctacattctatcacagtgatgtatggtcagacttaacagccccaaytgttaaacacttggatcaagtcataaccagttttattgcaaaaggaccctgttgtacacatttatcaattctagtaccttaatagctacccaacaagtcattaacatacagaaacatgcatcatgagaagcaagaaatatcaygcatccgttttgcatattaacaacttgtcactcctgagcaacagtgctgacatcactgaggtctgtaaacagtcacttttcgcattcatcctgagtgaaagatggaatgacttaagtacaaatgcaacatataaacaatttcttacaaaaaaagtcaccaattaaaccaaagtattttacagaatttactacaaaatgccataaaaactgccttcmcttaagctctctctccccgtatccggcgagccaactggatgtctttgggcatgatggtgactctcttagcgtggatggcacacaggttagtatcttccaacagacccaccaggtacgcttcgctagcctcctgcagcgcaccgacggctgcgctctgaaacctcaggtcagtgttgaaatcctgcgcgatctccctcaccaacctctggaagggcagcttccggatgagcagctcggtcgacttctgataacgacgaatctctcgaagcgccacggtcccaggcctgtagcgakgaggcttcaccccgyaggtagagggggtgcttttcctggcagctttcgtggccagctgtttgcggggggctttcccacyggtggatttacgagcagtctgcttggttcgggccattttctttcacccaacgccgaagttttaggccacttctccgacctccgcgctgcttccgctgcccgaggaagagccgcagtcgcgagcgaagaaccgacactggtccaacgaacgaccaaaccgctctgcgccctcctctcttttatctgcatcccttccattcttcaaagcccatttcggtgtttcgttttttgttgttgttttgttttttgagacggagtctcgctttgttgcccaggctggagtgcagtggcgtgatttcggttcactacaacctccacctcccaggttcsagckattctcctgcctcagcctccagagtagctggrattacaggcgcctgccaccacacctggttaatttttgtatttttagtagagacggagtttcaccatgttggccaggctggtctcaaactcctgacctcaggtgatccgcccgccgcagcctcccaaattactgggattacaggtgtgagccactgcacccgkcctttcaaagctcatttcaatcccacctccktcacaaagcattcttcagccaccttcgttttcatcctttttttctctgcactctttctacccttatcatttacttgacactatgcaaattctacatgtatatgtatttctcatttatttttagtaattatcttttttcttattataaaagtaatacttgtccaatttaaaatacaaaaaatatagagaaacaaactgaaatgtggaatcacatgtgataaacacacacacaagttggctgaatatctgttactcttggaatggggaaagaatcatctagtcatctgccaagaggtataaacctaaagtttagaaacagaaatctgacttttaaatgttacagttctatatgatatttgttccatggagtaaatcataaagtttctctctctctctctttttttttttttttttttgttttttkggagatggagtttcactgtcctcacccaggctggagtgcaatggcacgatctcgtctcgctgaaacctccacctcccaggttcaagcaattctcctgtctcagcctcccaagtagctgggattacaggtgcctgccaccacacctggctaatttttgtatttttagtagagaygggggttttaccattttcgccaggctggtctcgaactcctgacgtgaagtgatccacccacttcagcctcccaaagtgctgggattacaggagtgagccaccgtgcctggccacaaagtatctcttttgtcaggtgagttttttaacttctagaaatatgccacaaagtgagccaggtgtggtggctccgcctgtaatggtagcactgggaggccgaggcaggtggatcacgaggtcaggagtttgagacgagcctggccaacatggcaaaacctgtctctactaaaaatacaaaaattagccaagcgtggtggcatacgcctgtagtcccagctactcgggaggctgaggcaggagacttgcttgaacctaggaggcaaatgttgcaatgagcccagattgcactactgcactccagccagggtaacagagtgagactttgcctccaaaaataaaaaaataaaataacgaaaagctattggattgaccattgatactttccacatctgaagaaatctaccttattttcaaaagggcaaaaaaaggaagggttccccgccccaggttaaaatatagtaaaatctctgagtaattcataacaaataaagcaccttcacactaccataaatctctacactgtgttccaatctgttgagtgcctgaatccaatgacagctttggacgtccccttcccccataatctctgtgcagaccctcaacctcaccccagatgcctttggagttttcattctttattataarcaattgatagtttctcagacttttatatacagcgtaaagaaaatccgtacccagccgggcggtggctcacgcctgtaatcccagcactttgggaggccgaggcgggcggatcacgaggtcaggagatggagaccatcctggctaacacggtgaaacgccgtctctactaaaaatacaaaaaaaaataggtgggcatggtagcaggcgcctgtrgtcccagctactcgggaggctgaggcaggagaatgacgtgaacccgggaggcggagcttgcagtgagcggagatcgcgccactgcacttcagcctgggcgactgagcgagactcctccaaaaacaaaaacaaaaacaaacaaaaaaaagaaaatccgtacccttactactacactaggggcacaaggcggggaagagactcaaacaataagagctactactgtttgctgaacacttatgtactgagtacattccatcctcagaatcaaccttaaacwgttaacatcctcattttacagatgaggaaaatgaggctcagaagagttaactaacctaagagaccctgaagtcctagcattttccacatggaacattttcccctgcaggtcccctttgcctgtagttgttccttccacctcttcctgtgcaggatcttagcccctaactgttcctcctgtccaggctgatcaatccaaagtgcccaaacagtggctgctcatctgcaacaacaattcctccctctttcaagaatctctttgaccaactcttccccaaactagccgcattctggctgacagtcccctctcccactccagctgaagttcgataaaattcttgccgtttcttcccccaagacaggccgttttttagctccttctcaggcctgacattttgaataatgtctatgctaatggagattcagaccctgatctcttcactgccgtactatactggtagttttcaaatttaaaagtcactggttgaattgtttgtttgcaacttgaaatgtcctctctcatagaagtgataccatggtctgaagccagccttttcagctgttataatcatcctgaagctgcctaagtggaggaaataaggcagtaatgaaataaaagattggatttaagtgaatgaaagaaacaggttttggtagagtgaccatataatttactatccaaccaggatactccggggagtgaaaaggtgctattaataattacaccaggacaataggcaggcataaactgaggctgtcctggacacatcaggacatatgttcactctaggtgtmggtcacatcagaatggctttgagcaattcaccctaacctccttgagcctcaatttcttcttcttcttcttcttttcttttttytttttttgagacagggtctcattctgtcactcaggctaaagtgcaatggtgtgatctcggctcactgcagcagccccaaactcctgggctcaagcaatcctcctgcctcagtgtcccttgtacctgggactagaatcgccccaccaagcccaactaattaaaaacaattttttttttttgagatggagtctcrctctgttgcccaggctggagtgtggtggtgcaatcttggctcactgcaagctccgcgtcccgggttcwtgccattctcctacctcagcctcctgcgtagctgggactacaggtgcccrccaccatgcccggctagttttctgtatttttagtagagacggggtttcaccatgttagccaggatggtctcgatctcctgacctcgtgatccacccrcctcggcctcccaaagtgctgggattacaggtgtgagccaccgcgcccggccaaaaacattttttttttttgtagaactggaatctcaccatgttgcccatgctggtttcaaactccgatcctcaaatgatcccaytgcytcagcctcccaaagtgctgggattataagtgtgggccaccgtctccagcctgagcctcaatttctttattgtgaaatgggaggattgacattatggggtgattgtgagaatgacataagtcagagtctattgtgcaaaattgaatttgtaaagtaccatataaatatactttttcagataatagttatgactaatactgttacaggaaaggkgtcccaatccagaccccaagagaaggttctggatcctgcacaagaaagaatttggggcgagttcataaagtaaagtgaaagcaagtttattagagaagtaaaagaataaaagaatggctactccataggcagagcagtggcacgggatgttcaactgagtacacgtatagttatttcttgattatatgttaaacaaggggtggatcattcatgagttttccaggaaaagggcagggatttaccctaactgagggttcctccccttttagaccatatagggtaacttcctaatgttgccatggcgtttgtaaactgtcgtggtgctgctgggagtgtctttgagtatgctaatgcattataattagcgtatagtgagcagtgaggacaactagaggtcactttcatcaccaccttggttttggcaggttttggctgccttctttatggcattrttttatcagcagggtctttatgacctctatcttgtcctgctgacctatcttgtcctgtgactaagaatgcttaacctcctgggaatgcagcccagtaggtgttagcctyattttacccagaccttattcaagatggagtccctctggttccaatgcgtctgacaatactgctgccctgaggtgcctggtgctgattagaccgcgatcaagtgcatattcgctgttgattgatgttactctcctctgtgccactctccctatgtgggcagtctcttctaactgcgggaacagcaaaccaaccagtgagaaaggccatcgtcatttcattcttttgtgtgccaaagcacacaaaccacttagagaatattagagaatatgttctatttccttccagaaaaaaaaaacccactttttttttttttttgagacagagtctgggtggagtgcagtggcgcgatcttggctcactgcaccctcatcttcctgggctcaagcaatcctcctaccttagcctccagagtagctggtactacaggcacatgccaccatacctggctaatatttttgtatttttggtgaagatggtgtttcgctgcattgcccaggctggtctacaacgcctgagctcaagccatctgcctgcctctgcctcccaaagtgctgggattataggcatgagccaccgcgcctggactcacacattctgtttcgattgaagtataaaatgagttagtgttggtgagtaaaacatgaaatttataaacccaaaccccaatcagcaagctagtgagagagagtgctcagcatgggtgctcagcacgcaggaagtccttgagcacaggctcagctcacttttcacttacaattgaaaatctgcactcaggttatgtcatctttggatactccctcctcagacttctccccagatctctaggcaagggggcactaattagaccaacgtgctttgcagcccttgttgactatttccctcacttgtcgttataacattgccttgaggaggagacacttctacagtaaccaggacatgcccgggaagtcccattgtgtggggccctttacccacctttttggccagcttccagtgttcttgacttactggagatctggtagtcttacggccgaaacataattcggttttcattctcttatctcatgtccgagaaccaactattcaacttcctccctcactgctgactggggcgacttttccatggaactaaaaatcctccacatacccgctctatatgaccttgttctttattttccaaggttcttaacctaatacagttattatttacaattctgtgtaaatcctttgtgggatttttttacatactataaccattcatrcattcaacacatattttttgagtgtctagtatatacaacaggtgttggtctaggtctagggctgtatcagtgaatgaaactaagtctttactgtcaaggagtttacatttaattgggtgacacaaaaactacaatagatagataatgtgtctattatagaaatgataataggtgttatgggagaaaattattatagtgtaaggaggacaggtagtccaggggaggggtgtggaaatactgctttacacaagggtagtctgggacagctccgctgtcaaggtggtatctgaatagaaatgagagagyaagccatatggatatgtgatgaaagtgtccctggccgggcgcggtggctcacgcctgtaatcccagcattttaagaggcmgaggcgggcggatcacgagaccatcctggctaacacggtgaaaccccgtctctactaaaaatacaaaaaattagccgggcgtgttggcgggcgcctgtagtcccagctactcgggaggctgaggcacgagaatggcggagcttgcagtgagccgagatcacgccactgcactccagcctgggcgacagcgatactccgtctcaaaaaaacaaaaacaaaaacaaacaaacaaaaaaacgcaaaattagccaggtgtggtgttgtgcgcctgtagtcccagctactcaggaggctgtggcagaagaattgcttaaatccgggaggtggaggttgcggtgagccgagatcgcgacattgcactccagcctgggcaacaagagcaagactccgtcccaaaaataaaaaaatgaaaataaataaaaagagacggccaggagcggtggcttacacatgtaatcccagcactttgggtggctgaggcgggtggttcagctgaggtcgagagtttgagaccagcctgaccaacatggagaaaccctgtctctactaaaaatacaaaattagccgggcgtggtggcgcgtgcctgtaatcccagctactctggaggctgaggcaggagaatggcttgaactcgggaggcagaggttgctgtgagccaagatcacaccattgcactccagcctgggcaacaagagcaaaactccatctcaataaataaataaataaataaataaataaataaatacaatgatattgcagaggccaagtgaagaaaatgtccataatcatactccaaaataataggcttccttggctgggtgtggtggctcacacctgtaatcccagcactttgggaggctgaggcaggcggatagcctgaggtcgggagttcgagaccagcctggccagcatggtgaaaccgcttctctactaaaaatacaaaaattagctgggcgtggtggcaggcgcctgtaatcccagctactcgggaagttgaggcaggagaatggcttgaacccaggagatggaggttgcagtgagtcaagatggcgccattgcactccagcctgggcaacagcatgaaactccatctcaaaaaaaaaaaaaaaattagccaggcatggtgatgcgtgcctgtaatcctagctactagggggcctgaggcaggaggatcacttgaacctgggaggtggaggttgcagtgagacaagatggtgccactctactccagcctgggcaacagagtgagactccatctcaaaaaaaaaaaaaaaaaaaaaaaaaaaaagattgtggcgagcaagtttcttttgaactcnnnnnnnnnnnnnnnnnnnncttggtttttatgacatgaccttttttaagtgcacagtgttgtcaaaaagagtcaaactctgtaaaatatttaaagaaatttattctgagccaaatatgagtgaccatggtctgtgacacagccctcaggagatcctgagaacatgtgcccaaggtggttgggtgcagcttggttttatacattttagggagggcatgagacattaatcaaatacatttaagaagtacattggtttggtccagaaaggcgggacaactcaaagcagataaggcagtggaggggcggcgggggcgggggcgggagggcgtcggtcggggggccttccaggctataggtaaatttaaacattttctggttgacaattggatgagtttgtctaaagacctgggatccatagaaaggaaatgctcaggttaagataaaagattgtgggggctgggcacggtcgttcacacctataatcccagcactttgggaggcagaggtgggcagatcacgaggtcaagagatggagaccatcctggccaacatggagaaaccctgtctctaccaaaaatgcaaaaattagctggggttggtggtgcgttcctgtagtcccagctactcaggaggctgaggcaggagaattgcttgaacctgggaggcagaggttgcagtgagccgagatcgccactgcaatccagcctggtgacagagggagactctgcctcaaaaaaaaaagaaaaaaaagattgtggagacttcgctggcctggtggctcacgcctgtaccccagcacttaggccaggcgcagcggctcactcccgtaatcccagcacttaggccagtygcattggctcacatctataatcccagcactttgggaggccgaggcaggcggatagcctgaggtcgggagttcgagaccagcctggccagcatggtgaaaccgcttctctactaaaaatacaaaaattagctgggcgtggtggcaggcgcctgtaatcccagctactcgggaagttgaggcaggagaatggcttgaacccaggagatggaggttgcagtgagtcaagatggcgccattgcactccagcctgggcaacagcatgaaactccatctcaaaaaaaaaaaaaaaattagccaggcatggtgatgcgtgcctgtaatcctagctactagggggcctgaggcaggaggatcacttgaacctgggaggtggaggttgcagtgagacaagatggtgccactctactccagcctgggcaacagagtgagactccatctcaaaaaaaaaaaaaaaaaaaaaaaaagattgtggcgagcaagtttcttttgaactcttatagtggctgcccttagagagaatagatgacagatgtttcctattcagaccttaaaaggtgctagactcttagttaatctcttcaggagtgctcgcttcggcagcacatatatatgatgatctcttcagggttcggagggcctggaagaaaaagatatagctatgttaatagagattctttacagatgtgaatcttcccctccaaaggacagctgtgcagggccatttcaaaatatggcaaagaaacatgttttggggtaaaatattttgactttcttctttgtcacataatgttaygccagagtcagattggaaagtaagtcacgatatatagggttaaatcaaacccatctgatgagaatttatagtttgtaggccatgactctccagacccttaagataggaatttaggcaagatgaaaaaaaaaaatcagagcttagtcttcacagacaaatagatttttagaatgttcatcaatttaggttttctaaatgtctcttcatgatgaggtttcttccatttttggcagtaaactacataaatgatcttgtatatatatatattagaaatacaggcccagagcggtggcttatgcctgtagtcccagcactttgggagactgaggtgggcctcacttgaggccaggagttccagactagcctgggcaacatgacaaagccacatctctactaaaaatacaaaaattagttgcgtgtggtggcatgggccggcctgtaatcccagctactcaggtggctgaggcagaagaatcgcttgaacccaggaggtggaggttgtagtgagccaagatcatgccactgcactccaggctgagacacagtgaggctctgtctcaaaaaaaaaaaacaaaaaaacaaaaaaaccccacaatgttgggtgattcactattaaatagtaatttaccagttaagaaaaaatatggagcacgaatttccacgtcagcatgtcatcctttcacaggaggcatgctaatcttcttcgtaacatccaattttaatatatatgctaggccgggcrcggtggctcacacctgtaatcccagcactttggaaggccaaggcaggcagatcacaaggtcaggagatcgagaccatcttggctaacacggtgaaaccccgtctctattaaaaatacaaaaaataagccgggcgccgtggcgggcacctgtagtcccagctactcaggaggctgaggcaggagaatgacgtgaacccgggaggcggagcttgcagtgggccgagatcacgccactgcactgcagcctgggcaacagaacgagactctgtctcaaaaaaatacacacacacacacacacacacacacacamtatgtgcatacacacatacgtgcacgcacatgtacatatatacatacgtgcacgcacatgtgcatatatacatacatgcacgcatgtgtatatatacatatgtacacacatatacacatatatatgctgaagcaagcataatttaccaattttttaaaggaggattatgtcaaatcaaaaactgtgatgggaccaggcaaggtagctcatgtctgtaataccaacactttgggaggccaatgtgggaggattgctagaggccaggagtttcagaccagcctgggcagtatagcaagaccctgtctcttaaaaaaaaaaaggcaactgtgatggatgtgagatcttaccccacttgcatagtcataaataagcacatagatagagatgataaatagatactagacgaaacatcaggtttcgtctagtcaaagatcagagctttatttactcacagcaataagagtagccacagcgacattgctgagttgtcctcaagcctgagaattcatataggaaagagactctcctcaaaggagagggaaaagctttgttccctaaggtaaacacattttccttaggaacaaaaaggaaaggagtttgtggattctcaccttttggaatctaagtatctatctctactgggaagataaaatcagcctctttgaggcttttctccacttttgacttgcaaactcatggagagatagttctctacattctttcagagatctttctagggaggaggggaagttccctatcctggaatgtaaggctctgcctccaggtaagagaagttttattatcctttaagtggaagccagtgtctctataatgaaggttgtagagaacaaatatttatgggggaaatgaaagcaagcattttcattttcatagtagattaatatctgtggttcaagagcctgagtttgcaggaacactcagtaatacagagaaaatgtatttcccacagactatagtgcaaaacttcagaatarataaaagttgacttcagtaacacatgggtatcccttctgccctccttccctcccatttactgcatcttttttttgatctttggtgctctcaccggactctaccctgtacttctattttggggtatggatcccttcccaaaagactctttgttacaagattacttttcccatattttacatcctatacttttagagtagctcatctcagctagttgttataaggaaagtaaactaagtcaaaattagtcatcaatgaattattagcttttagtactgcrggagattttttttttcaagagtaccaatgtgtccggaattggtgggttcttggtctcacttcaacaatgaagctgcggaccctcgcggtgttacagctcttaaggtggcrcgtctggagtctgtcccttctgatgttcagatgtgtttggagtttcttccttctggtgggttcgtggtctcgctggctcaggagtgaagctgcagatcttcgcggtgagtgttacagctcataaaagcagcctggacccgaagagtgagcagtagcaagatttattgcaaagagtgaaagaacaaagcttccacggtgtggaaggggacccgagctggttgccaatgctggctcaggcagcctgcttttattctcttatctggccccacccacatcctgctgattggtagagccgagtggcctgtttcgtcagggcgctgattggtgcgtttacaatccctgagctagatacaaaggttctccacgtccccatcagattagttagatacagagtttccacacacaggttctccaaggccccaccagagcagctagatacagagtgtcgattggtgcactcacaaaccttcagctaaacacagggtgctgattggtgtgtttacaaaccttgagctagatacagagtgccrattggtgtatttacaatccctgagctagacataaaggttctccaaggcccaaccagagcagctagatacagagtgtcaattggtgcactcacaaaccttgagctaaacacagggtgctgattggtgtatttacaatccctgagctagatataaagactctccacgtcctcaccagagcagctagatacagastgtmsactggtgcactcacaaaccttgagctaaacacagggtgctgattggtgcatttacaatccctgagctagatataaagactctccacgtcctcaccagagcagctagatacagagtgtcgactggtgcactcacaaaccttgagctaaacacagggtgctgattggtgtatttacaatccctgagctagatataaagactctccacgtcctcaccagactcaggagcccagctggcttcacctagtggatcccgcaccgtggctgcaggtggagctgcctgccagtcctgcgccgtttgctcgcattcctcagcccttgggtggtcgatgggactgggcgccttggagcagggggtggtgctcrtcggggaggctcgggccgcacaggagcccacagagggggtgggaggctcaggcatggcgggctgcaggtcccgagccctgccccrtgggaaggcagctaaggcccggcgagaaatygagcgcagcrccggtgggccagcactgctgggggacccagtacaccctccgcagccactggcccgcgtgctaagtcccccattacctggggccagcagggctgactggctgcccgagtgcggggcccaccaagcccacgcccacccggaactccagctggcccgcaagygccgcaggcagccccggttcccgctcgtgcctctccctccacacctccctgcaagctragggagtgggctccggccttggccagcccagaaaggggctcccacagtgcagtgggggggctgaagggatcctcaaatgccaccaaactgggagcccaggcaggggaggtgccgagagcaagcgagggctctgaggactgccagcacgctgtcacctctcaccaatacttgtcatgtggatgggagacactgtaaaaataaagtgaggtggaaggaaaaggtctgtgaaagcatacttgtaattcataaaataccatataaatgaaagtaaagttgtgtaataattctaaaccaaaaataaaattctaaggccccccaaccatctgaatggactttctcctggccagggcacttttaaaatttaacctgaaagactggttcgggccrtgatggaagggggtggtcagacatgccttgttatacctctccggcattaatatcaacacagaattcagtctgataagaaacattttacagcctattctctctcaagcccactacctgaaggcctcctctgcacatcagaactttggtctccataatccttcatcttaacccagacatttcctttctattcatcccaggtctttagataaactcaaccaattgtcaaccagaaaatttttaaatctacctgcaacctggcagcccccttccagttgtcttgcctttctgaactgaaccagtgtatttcctaaatgtatttgattgaagtctcatgtctccctaaaatgtataaaactaagctgcaccccattcgccttgggtacacattctcaggatctcctgagggctgtgtcatgggccatgatcactcatgtttggcagaataaatttcttcaaatattttacagagtttgactctttttgttgacataattatgcaccgagacttgggaaagagaagacacttaccgcagtgtattttaatacatatgacgttgacttcctgcattttggtgcacaggtcttcattttcctgcctccgtttcatggtcacaagatagctgctgtacccacatgtcaggcctctgagcccaagctaagccatcatatcccctgtgacctgcacgtatacatccagatggcctgaagtaactgaagaatcacagaagaagtgaaaatggcccattcctgccttaacttatgacatcccaccattgtgatttgttgctgccccaccttaactgagcgattaaccttgtgaaattccttctcctggcttagaaactcccccactgagcaccttgtgacccccacctatgcctgcaagagaaaaaccccttttgactgtaattttccactacccacacaaatcctataaaacggccccacccctatctcccttcgctgactctttctggactcagcccgcctgcacccagttgaaataaacagccttgttgctcacacaaagcctgtttggtggtctcttcacacggatgcgcgtgacaccacagagtcacatttatattcctggcagaaagaggaatataaagtaaaggaagaagaaggcaaatargctttgtctttttattctgaaaaggacactaccctcagaaaccaccaccttcatcttattgctaaragcagcgtcacatgaccagcacaagtgcaaatgaggatgggaaagtgagtttttaaattgaacacatggctatttcaaataaaagcagggttctattacaaaaaatggggtgtrtgtgtgtgtgtgtgtgtgtgtgtatgtgtagagggggatattttttaaataggcaactaatagtgttgacttcatccagcaattttacctccaggaatgtatcctatagtgatatatgaggactaagctctgatttttttttttgcccaaattcctatctaaggggtctggggagtcatgccctacaaatcatcaattctcatcagatgggttttatttaatcctgtatattgtgacttactttccaatctgactctggcataacaaggaagaaaatcaaaatattttactgcaaaacatgtttctctgccatatcttgaaacagccctgcaaagtctcttgtgggaaaaatccacattctgtagagaatcccctttccccctttgttttccttccttcctttccagatccaggagataatcagctaagagccaggcacccttctaagttcaataagaaacattttacaacctgctctctctgaagtcagctatctgagagcttcctctgcacaataaaacttggtctccacaatcctttatcttaacctgaacattttctttccattgatccccggccttcagataaactcaaccaactgtcaaccagaaagtatttaaatttacctatagcgtggaagccccggctttgcrttgtcctgcctttctgaaccaaaccaatgtatttcttaaatgtatttgattgatgactcatgtctccctaaaatgaataaaaccaagctggccgggcgcagtggctgatgcctgtaatcccagcactttgggaggccaaagtgggcggatcacgaggtcaggagatcgagaccatcctggctaacacggtgaaaccccgtctctactaaaacaaaaaattagccaggcgcagtggcaggcacctgtagtcccagctactcgggaggcttgaggcagragaatggcgtgaacctgggaggtggagcttgcagtgagcagagatcacgccactgcactccagcctgggtgacagagcgagactccgtctcaaaaaaaaaaaaaaaaaaaaacccaagctgtgccccgaccaccttgggcgcatattctcagaatctcctgaggsctgtgtcatgggccatggtcactcatatttggctcagaataaatctcttcaaatatttaacagagtttgactcttttcatcaacatatccactgtggcagaaacctgttggtgtccccacctcaatccctggggatccctgctaccattttgtggtgcccattcccccaggagctgtgggtgctgctggtaatggtttgtacctacaaccccaggggactggacttggatgattagagccacctggacatgaagttcatgggagttatgtgctgctttaaccagtgactgtctatggtagggtacaaatgttctggtcccttgcctaagggcagacagattctgcttgcactttatgcttcagggctcccggtaggaataggctgagtctagacttcccctgaaaccattcttgctttccttcttcccctcccctggcctgcttccctccctcaccctcctagatttctacctagactactttcctaataaatcacttgcctacgaagctccaccagtctcagcttctagggaaatagactgaagacactcacgtatgcacaaaatgacatatacaagattatccattgyttcattcataatagaagactgttaacaagcaaatgttcatcactaggctcctggttaaataaagtacagctgccccaggaaggaaactaggggttcaggaatacggtgaaaagtaaactttcactgaacttttagttctttctgaatttttttttttttgagacagagtctcccccttgcccaggatggagtrcagtggcacgatctcggctcacygcaacctccgcctcctaggttcaagtgattctcctgcctcagcttcccgagtagctgggattacaggtgtgcatcgccacacccggctmatttttgtatttttagtatagatggagtttcaccatgttggccaggctggtctygaactcctgacttcaggtgatccgcctgccttggcctcccamagtgctgagattacaggtgtgagccaccgtgcctggcctctttctgaattttgaagcatttggatgtattgctttttttttttttgagacggagtctcgctctgtcaccaagctggagtacagtggcgagatctcggctcactgcaacttccacttcccgggttcaaacgattctcctgcctcagcctcccgagtagctgggactacaggcgtgcaccaccacgcccggctgatttttatatttttagtagagatggggtttcaccatgttggccaggctggtctcgaactcctgacttcagatgatctgcctgcctyggcctcccaaagtgctgggattacaggcatgggccaccatgcctggcctgcttattttttaaaaaaataaaattaatgttaaaataattaattaasgctgggcacagtggctcacacctgtaatcctagcactttaggaggccgaagcaggtggatcacttatgcccaggagttcgagaaccagactgggcaacatggtgaaacctcatctctacaaaaagtaaaaaaattaaccgggcatggtcgtgcatgcctgtgttcccagctacttgggaggctgaggtgggaggatcacttgagcctgggaggtcgaggctgcagtgagctatgattgtaccactgcactccagcctgggtgacagtgagattctgtttccaaaaaaaattaattaatcaaaaaatccactaaacaagtaaattggatacttaggtgaaaatcttaagtgtaggccgggtgcagtggctcacgcctgtaatcccagcactttgggaggccgaggcgggtggatcacaaggtcaagagatcgagaccatcctggctaacatggtgaaaacccgtctctactaaaaatataaaaaattaaccgggcgcrgtggcgggcgcctgtagtcccagctactccggaggctgaggcaggagaatagtgtgaacctgggaggcagagcttgcagtgagccgagatcgtgccactgcactccagcctgggcgacagagcgagactcagtctcaaaaaaaaaaaaaaagaaagaaaatcttaagtgtaagtacctaaacaatctattaaatgacctgtgaaaccaagggctcctaatgctatgaccaaagactgaagctctctatgagatgccagccactcaatagtgcactttttctgagaagatataagacagccactcagaattatgatgtaataattggtaatgtggggaagtaaataaatgtctcaaagttttgcttttgaaaaatgactagtaaatagtaataacaaaactgttatttatggagggatgagtctgtggcctatctctcttcccttttatgtctacgtttctcacagtcatctmcactccctgtcacttgtacttattcccttgacactgcaatctagcttcatccactccccyaaaatgactcttcccaacgctatcaatgacccctttgtctttccatccagtggctgtttttcaatcctcgtattccttaactctcagcagcattctgtgacatgatgctctcctggtgttctgcctgcatctctgctcatttctttttagactcctttgtcagtttatgctcttctgccagtctttttttgagacggagtttcgctcttagtccaggctggagtgcagtggcgcgatctcagctcactgcaacctcagcctcccggggtcaagcgattctcctgcctcagcctctccagtagctgcgcctgccaccaggcccagctaattcttttcttcttttttttttttttttgagacagagtctcgctctatcccccaggctggagtgcgtactctatcccctaggctggagtacagtgtcgcaatcttggctcactgcaacctccgccacccaggttcaagttattctcctgcctcagcctcctgagtagctgggattacaggcgtgtgccaccatgcctggctaattttttattttttatttttgaaatggagtcttcctctgttgcccgggctggagtgcagtggtgcgatctcggcctactgcaacctctgcctcctgggttccagtgattctcctgcctcagcctctcgagtagctgggactacaggtgtgcgccactgcgccaggctaatttttgtatttttagtagagacagggtttcaccatattggtcaggccagtctcaaacttctgactttaggtgatctgcccacctcagcctcccaaagtgctgggattacaggcgtgagccaccatgcccggccaatttttgtattttttaattagcaacggggtttcaccacgttggccaggttattaaccacatccatggctctgattaccacctgtggataaataygtccccagttctcctctgagctcctattttcctttttttttagagggtctcactctgtcacccaagctggagtgcaatggtgcgatcatggctcattgcagccttgacttccagtgctcaagccatcctcccacctcagcctccsaagtgtctgggactacaggcatgagccaccaagcaccagctaatttttgtatttttttgtagagaaggggttttgccatgttgcccagactggtctcaaactcccgagctcaagcratctactggcctcggcctcccagacagctgggattacaggcacaagccaccgtgcccagcctctgagctcctattttccttttattattattattattattattattattattattattattattattattttgagacggagtctcactctgtcacccaggctatagtgcagtggcacgatctcggctcctgggttcaagcctcctgggttcaagtcattctctagcctcagcctcccaagtagctggggctacaggcatgcaccaccatgcccggctagtttttctatttttagtagcgatggggttcaccatgttagccagactagtctcaaactcctgacctcatatgatccacccacctcggcctcccaaagtgctgggattacaggcgtgagccaccgygcccggcctgagcgcctatattcaactgcacatttaacatttccacttgaatatcccattgaatggcaccaacattcatccaatttctcctttcaggagcttggggaccatctttctcttttagtattcatatctaacaaatcaccaagttccatcaattttatcatttaagtatctttctaatctgttcatttccttccatctatactgtcaccaccctcattttaactaccttatagtttctcacctgattagtccaaaagccttttaacttcctttctgctttcaatcttgttttttctctattgcattcctcacactgcacccagaataatctttttaaaatgtaatgtcacactcccttcagtaaaatcttgcctttgattttcagtgcatttcaaatgaagtccaaagttctcaccatgaactccagtgctgtgtgatctggcctttgcctgcctctcccattttgtttcacagccctctccctttggctccctctaggttccttcctcagcagtggttctttattgtctcagggcatctgcttttgttgtttcacagttgttaacattcttctttctgctttcatgtatttggccttttctcagtgttcaagtcttggatcaaatgtcacttcctcagaaagccctctccaggccgggcacagtggctcacacctgtaatcccaacaatttagaagaccatggtgggaggatcacttgagcccaggagttcaagaccagcctgcgcaacatggtgaaactccacctttacaaacaattgtttaaaattagctggatgtagtagcgtgcacctgtagtctcagctactcaggaggctgaggtgggaggattgcctgagaggttgaggctgcagtgagctaggattgyaccactgcacttcagcctgggtgacagagcaagaccctgtttcaaagaacaaaatgcatcttattcttggtacttgtaatttgtaaacacattcatttacacatgcacatacgtctatataattacatattaaatatgtaattatgtattcacgtgtttattgtccatctccaacacccacctctatcccaaatgtcaactccatagaggcagggaccttattagtcttgttyaccagtgtattccttttagctagaataatgcctagcacacagcaagaaaagtaagaaaaatgatgtggggaatcttttaacaaatgattattcattcakagattccccacatcatttttctttcttttttgccctctagttacattggctttgaattcttttttctttttttttgagacttagtctggctctgtcgcccaggctggagtgcagtagcgccatctcggctcactgcaatctccgcatcccgggttcaagcgattctcttgcctcagcctcctgagtagctgggattacaggcgcccgccaccatgcctggctaannnnnnnnnnnnnnnnnnnntttcaccgtgttagccagggatgtcttgatctcctgaccttgtgatccaccagcctcggcctcccaaagtgctgggatcacaggtgtgagccaccgtgtctggcctcagctgaacattttttaagaattcaaagctggccaggtgcggtggctcacacctgtaatcccagcactttggaaggctgaggcgggtggatcacaaggtcaagagattgagacaatcctggccaacacggtgaaaccccgtctctactaaaaatataaaaattagctgggcgtggtggcatgcgcctgtagtcccagctacctgggaggcggaggcaggagatcgcttgaacccaggagacagaggttgcagtgagccgagatcttgccactgcactccaacctggcaacagagcaagactccgtctcagaaaaaaaagttcagctggtgctgtggcttatgtctgtaatcccagcattttgggagggtgaagcaggaggctcacttgagtccaggagttcaagacaagcctgggcaacatagtgagagctccatctctacaaaaaaatacaaaaatagctggacatgatggagaacgcctgtggtcccagctactcaggaggttgaggtaggaggattgcttgagcccaggagtttaaggctccagctgaccatgattgcaccactgccctccagcctggacaacagaatgagaccctgtctcaaaaaaaaaaaagaaaraaaaagttatgtaactttctccctcatttccttagaatatgctatttgctctgcctgataagctccctgccaccacatatttagttaatgactacctgctttctaggtctcagtgtaaatgctactgctttagcgttgctactcctgacattctagacaaggtgaggtcactgttatataatcccctaaaacctatcttttcccttcagaacacttatgatttgtaattatttttatttatttttgtttggctgggttttttgtttgtttgtaattatattttcttgttggtctgtttgctctagaccagagatcagcaaactccagcccatgggccaagtccagcctaccacttgttttataaataaagtttttggaatacagtaaaatgcattcatttatgtattgcccatttggctcctaaaatatttaccgtctgctttttttttttttttgagatggaatttcgctctttttgcccaggctggagtgcagtggtgcagtctcagctcactgcaacctccgcctcctgggttcaagtgattctcatgcctcagcctcctgaatagctgagattacagatatgcaccaccacgcccagctaatgtttgtatttttagtagacatggggctttgctatgttggccaggttggtcttgaactgctgacctcaggtgatctgcckgcctcagcctcccaaagtgctgggattacaggcgtgagccacggtgcccagccaccatctgctctttacagaaaaagtttgctcacctctactctagactagagtataatctctattaggacaaagatgatctcttcctacacactactaaaatttaaagaatttccgtaaaaactagtgaaataaaataaatggtaatcgctctgctaagtactttayatgtattacccacatcaattttatgakaaaaatattattatctacaatctacacrtgaggaaactgaggctcagagccatctggtgagttgccctaaggtcacacagctgataagtagcaaactgatgtttgaatytaagtttaaaacaatgtttcttctttaaattttttttttttttttgagacagagtcttgctcttgtcgcccaggrtggagtgcaggcgtgagccaccacacccggcccttctttaaatttttaaatgtaattaattgatactacaactagtcagtgaaagtttgataaggagcatcttatcataacacaattaattacyactaattaattamaaaagaaaaatagtaatgtgacagtgaaaacagttaatcaaagttaataccaccaataatggggcaagctgacatcattttctcctgctgtactgcaatgagatggtcataatagctcttatatagttttttgccaaaaatgcaaaatctgaatctaatcacaaggaaatatcyaacaaagccaaattgagggacatgttacaaaattcaaaacatcacataatccaaaagacaaaattttaaactgtcaacatcatgaaagacaaagaaaaactaaggaattgttrcagattgagaccaaagagacatgacaactaaatgtactgtgtgaacctagattggatcccagaccagagaatcttctttttctataaagaacattattgggactattgtgaatcggtgttacaagttgtgggtaattaaatatagctacagggagctgggcaaggtggctcacgtctgtaatcccaacactttgggtggccgaggtgggcaggtcacctaaggacaggagtttgagaccagcctggtcaacatggtgaaaccccgtctctactaaaaatacaaaagttagctaggcatggtggcgggctaatcccagcttgggaggctgaggtgggagaatcgcttgaacccaggaggtggaggttgcagtgagctgagatcaygccactgcactccagcctgggcaacagagtaagactctgtcgcataagtaaataaataaagctacagattatttgtatcccctcctgaaaagaggtgaagtctatttacccacctcttgaatcttgggctggtcttgtgactttgaccaataaaatggagaagtgatgacttctgaatttcattttgaaaaggtctyctggcttctgctcttgctcttagaattctgccctgagactattgtataaagaagctcagtatagcgtattaaagatgaggccacrgcctgaagtatacaagttgatagcaccaagtgctacgtatgtaaacaaaagaccatcttagagagatgacaagtcaagtggttccagggragatcagcagaagcaccactcagctgattccagtccaaatttcaacccacagaaatatgaacaataaacagatgccattataggctactaattttagaggtgatttgttttttttgtttttttgtttttttttgttttgttttgtttttgagatggtgtcactctgtcgcccaggctggagtgcagtggcgcgatctcgtctcactgcaacctccatctcctgggttcaagcaattctctgcctcagcctcctgggtagctgagattacaggcatccgccaccaggcccagctaatttttttttatatttttagtagagacagggtttcaccatgttggccaggctggtcttgaactcctgaccctgtgatccacctgccacggcctcccaaagtgttgggattacaggcatgagccactgcacccggctagaggtgatttgttatacaacaaaggctaactgaaacagacatatcttgagatcatttggctacttgggcaagggctcagaggtgaaaatgttaagarttatcaacttatagtctggtccccagttctcaggcgtgaaaattcaaaattgtgaatgaatccagaattgatgagattccatgaataccaggataaccaaagaattcatgataaccaaactcataagaaactatgtaagccaggatatctaccagaaaaatttatagtgaaaattacatatatttttcatgttctctttttggtaactggtaagtatcttttttttttttttttttttttttgagacagagtctcactccatcacccaggctggagtgcagtggcgtgatcttggtggttcactgcaaccttcacctcttgggctcaagccattctcctgcctcagcctcccgaatagctgggattacaggtgcccgccaccacacccagctaattttggtatttttagtagaggcgggttttcaccatgttggccaggctggtctcgaactcctgacctcaagtgatccacccacctcaacctcccaaagtgttgggattacaagtgtgagctgctgtgcctgtccagtaactggtaagtattgacagaatcagtttacttaaaggagagtgaaactggaataacaggagttatatagttttaagagatactttatccaaactgaaataaaccattcttatcccacaatagtatataactatggaacaactagagtatttgtgtccactatagtaaatttctctggactctgaatagtgagagctaatcagtgcaaaatcttgctctctggctgkcctttacttatctcttctgacctttgttttgattgcaaactttctttggacagtataaaaatcagtattttaggattagaacccaatcaatatattgagttcagttacattctagttctttctgcctgatattacactccaattgccttaatggatcttgagtgcttccagatattcttattaaatatttgtcatttttcttttggctttgttaattgtgacttatgccatgcataattttttgcttagtagtcaaatttatcattctaaaacaatctcttctgtgttttgcattatacttggaaggtcaaggaccttagagacatacytctggctattggatgtagactttctttcttttttttttttttttttttttgagtcagtgttttgctctgtcctcaagcctcgagygcagtggtacaatcacagctcactgctgcctccaccttcagggctcaagcaatcctcccacctcagyctcctgagtagctgagactatgcccagctaattttttattttttgtagagatggggtctcactatgtaacccaggcttgtcttaaactcctgggctcaagggatccttttgcctcaacctcccaaagtgctgggattacaggtgtgagccaccacacctggctgcaaataractttcaataaaaaaaactttcattccaggatcatcagtgcaggagtaagctagttgacctggtaacaaaacacatgacctcaataataaacaggaactcctaaagacaataagaggtaagatcttaggaaaaaaaaaaaaagttttcctcattcttgacctgtgaaacaatttcctggcttatattagaaacaatcattttgccagttcttgttttgtttcattttggcagggtctggtgctggtgctctcttctatgtaataaggtgccggatacgtacctacttacaagaaagattatttgtgtcttcaaagcaggtttacttttgttcataaagcaaaataaaatagcatactagtcatctgctacttattttaatttatggttgtttgtgtttacacaagaaagagggccttttgtgaaaagtaaatgatttacatatcagagataattaagataaccctatrcctctgatgagcaacctcacattttaaccatcttgctataaatmtatatagatcaactgaaatttatacaccttagtcacacccaaatttattatctttaacttcaagatcgattatctcctgtcacatcaaagtaaaattgtctgttacagaaatatatatgtgagcatgcaactgcrtaaaaataaggcagcttttagtgtattttgtgcatattgccataaatttgtacagastgacattctaatgatatttcttttattttcagatttataaatatgtgattacatattgtggaaaaataatgctataggctctgtatttcagttattattatatcttattcattctttactgcatttatgccagtaaaattgatctcacaggcctgctttttgcttataatgctaactaatgaaaatccagagcttggcttatcaatgtgagcctttgtaattaacagaagtcttggaaataaataaaggatatgctcctctcccctatagcacagagaggaggatgtctttctgagatataacacatattcaaaatatctgattttgtaaagtgtcaaatggtygatattgacaaaaatatcaatcttttttctcttttgtgcaatatggagagtggtgtgaatcttcggtttcttattrtaagtcwttttctttgaaaaaagagttttataaaactaagacttagaaacttacttgccctggccttgaaaattacctttggaaaaatgcttgtgctttatgggtcctgagaatatactacttttgagatttgtcaggacgcatttggctgagtaacaggttattctcatggctaaaagcctattacagcaaaggatattatacaggatcagcagaaaaaagttatgcctacaagaagacccgaaagattaggtgcagacttctaggttctccctccatgctggtcacagtaaggtgcttttggcacgactacaaattatacgaacatatatgagatgtctctgcccacgtaagtccacttaggtctgaggwcccggagttcttacaggagtctggttgcacaaggcacattcctcccacgtgacaatctatggtgcagatctttacccaggaggcaggtgctcatggcacatcttgatatttgtgttaggcagtgctggcaattgagcatgtcatgcctcagtgcctcaggagcacaaaacaacttcattggtgactatgttaactccaaggacttagccccaagtggttggctaagggttggtaccgtgactccaggtactcctggaaataagctgagtgaactcctttctcatagattataattctgattggtagctttacttgataatttgttgccctgatagtaatgttgtaattgacatttctgcatgtgtaaataggataaattcttgaaagattrctctgcaaatctgatcatttgtttctcatctcttttttttatattttattttattttatttatttattttttttttgagacagatcttgctctgtcacccaggatggagtgcagtggttgttcgctgcaacctccacttcctgagttcaagcgattcttgtgcctcaccttcccaagtagctgggattacaggcacgggccaccatgcccggctaatttttgtgtttttagtaaagatgagaattcaccatattggccagggtgatctcagactccaggcctcaggtgatctgcccaactctccacctcacaaagtactgggattacaggtgtcagccaccacatctggactgttcctcttttcttttgtgtataatggggttgggtggggtggtagggagaaaagtctgactttgctagatttcttattttaacaaagaatctgtgagtcttttctaggtaaaattaacaactagcaaggggttctagcagagtgtaatttcaaaatactctattatgcttgtaaaataaactattcacaatacatagtgtrgtataataataacagatgtttttgtcagcctaaaaataatgagttgaaggttctaacggttgcctttatagaaaataacatctttggccrggcgcggtggctcacgcctgtaatcccagcactttgggaggccgaggcaggcggatagcctaaagtcaggagtttgagaccagcctggccaacatggtgaaaccctgtctctactaaaaatacaaaaattagttgggcgtggtggcaggtgcctgtaatcccagctactggggaagctgaggcaggagaatcgcttgaacccgggaagcggaggttgcagtgagccragatcacaccattgcactctagcctgggcaacaagagcaaaactcygtctcaaaaaaaaagcaagtaacatctttgtccaggcgcggtggctcacgcctgtaaccccagcactttgggaggccgaggtgggcagatcatttgaggtcagaagttygagaccagcctgaccaacatggtgaaaccctgtctctactaaaaatacaaaaaaaattagcctggtgtggtggcacatgcytgtagtcccagctacttcggatgctgaggcaggagaatctcttgaacccgggaggtggaggttgcagtaagtggagatcgtgccactgcatyccaacctgggtgacacagtgagactctgtctcaaataaataaataaataataacatcttcactgagatacaggtatacttcagagataagcccatatatcaggaatatcaggttttgtgatatcaggttttgttctagaccactgchataaagtgaatattgtgataaagcaagtcacacaaattttttggtttcccagtgcatgtaaaagttatgcttacactatactgtaacctactagrtatgcaataacattatgtcataaatgtgcaacataaatacactaattataaaatactttattgctgaaaaaatgctaacaatcatctgagccttaattgagttgtcatcttgtgtcatcagcaaaaagctggtggagagtcttgcctcaacatggatgacttctgactgatctgagtggtggttgctgaaggctggagtggatgtggcaacttcttcaaatcagacaacaaaaaagtttgcygcattgatggactcatttttaaaatattttattttatttcaatagttcttggggaacaggtggttttgcttacatggatactttctttagtggtgatttctgagattttggtgcaactgtcacttgagcattgtacacggtgcccgatctatagtcttttatccytcactcccctcccaccttttcctgagtctccaaagtccaaagtctattgtatcattcttatgcttttgcatcctcatagcttagctcccatttataagtgagaacatacaatatttcgttttccattcctaaattacttcacttagaataatggcctcccrctccatccaagttgctgcaaatgccattatttygttcccttttatggttgagtagtattccatggtgcatatataccacattttctttatccagtcattgattgatgggcacttaggttggttccatatctttgcgattgtgaattgtgctgctgtaaccatgcacatgcaggtgtctttttcatataatgacttcttttcctttgggtagatacccagtagtgggattgctagatggaatggtagttctatttttagttctttaagkaatctctacactgttttctgtagtggtaaatgcgtttgcatttactttacactcccatcagcagtgtagaagtgttcccttttcaccacatccatgccaacatctattagtttttgattttttaattatgggcattcttgcaggagtaagctggtatctcattgtggttttaatttgcatttccctgataattagtgatgttgagcattttttcatatgtttgttggccatttgtatatttcttttgagaattgtctgttcatgtctttttccctcttttggatggtgttatttggttttttcttgctgatttatttgagttacttgtagattctcaatactagtcctttgttggatgcatagtttgtgaataatttctcccactctgtgggttgtctgtttactctgttaattctttcttttgctgtgcagagcttttttgtttaattaggtcccatctaattatttttgtttttgttgcatttgcttttgggttcttggtcatgaactctttgcctaaaccaatgtctacaagagtttttctgatattatcttctagggcatttttatggtttcgggagttagatttaagtctgtgatccatcttaagttgatttttgtgtaagatgagagatgaggatccagtttcattcttctacatgtggcttgccaattatcccagcaccatttgttgaataggatgtccattccccactttatgtttttgtttgctttgtcgaagatcaaatagctgtaagtatttggctttatgtctgggttctctattctgttccactggtcctatgttcctatcttcttcataccagtaccatgctgttttggtaaccacaggcttggagtatagcttgaagttgggtaatgtgatgcctccagatttattccttttatgtagtattgctttggctatgcgggctctttttcggttccatatgaattttagaattttttttctagttctttctttttttgagacggagtctcgctctgttacccaggctggagtgcagtggcgcaatctcggctcactgcaagctccgcctcccgggttcacgccattctcctgcctcagcctcccaagtagctgggactacaggcgcccgccaccacgcccggctaattttttgtatttttagtagaggcggggtttcactgtgttagccaggatggtctcgatctcctgacctcatgatctgcccacctctgcctcccaaagtgctgggattacaggcgtgagccaccgcgcccagctttttttctagttmtgtgaagaatgatgatggtattttgatggaaattgcattgaatctgcagattgcttttggcagtatgttcattttcgcaatattgattctactgatccatgagcatgggatatgtttccatttgtttgtgtcatctattatttctttcagcatgttttgtttatgttatttctttcagcatgttatttctttcagcatattccttgcagaggcctttcacctgctttggtaagtatattcttaagtattttgtggcttttttggttttgttttgttttgttttgcttttgttgttttgttttgttttttccagcaatgttgcaaaagagattgagttcttgatttgattctcagcttggttgctgttggtgtatagcagtgctacggatttgcgtacagtgattttgtattctgaaactttactgaacagggacagtttgacttccactttattgatttggatgccctttgtttctttttcttgtctgattgctctggctaggacttccagtactatgttgaatagaagtaataaaagtgggcatccttgtcttgttccagttctcagagagaatgctttcaacttttccccaatcagtataatgctggctgtggtggactcttcctttcacaaaagatttctctaggatgttatgctgtttgatagcattttactcatagtagaacttctttcaaaattgtaataaatccttttaaaggtgctttatcaactaaatttatggaatattctaaatccttcattatcatttcaacaatatccacagcatcttcaccaggaatatattccctctyaagaaaccactttctttgctcatccataaaaagcaactcttcatccattaaagctttttttagcatgtgattgaagcaattcagtcacatctttaggccccacttataattccagttctcttgctatttccactacatcttcagttacttcttctactgaactcttgaactcttcaaagtcatccatgaagattaaaatcaatttcttccaaactccagttcatgttcatattttgacctacttacatgaatcaaatggcacctaaaatggtgaatcctttccaaaaggttttcaatccactttgcccagattcatcagaggaatcactatctgtagcagccatcgtcttacaaaatgtatctcttagataagaaggcttgaaagtcagaattgccccttaattcatgggctgctaagtggatatgttaggatgcatgaaaacaacattaaccttcttgtacatctccatcagagctcttgggtgaccaggaacattgtccatgagtagtaatattttgaaaggaagstttttttttggagcagtaggtctcaacagtgggattaaaatattcggtcaattggccaggtgtggtggttcatgcctgtaatcccagcacttaggaggctgaggcaggtggattkgttgagctcaggagttcaagaccagcctgggcaacatggcaaaaccctgactctaccaaaaatataaaaaaattagccaggcatggtggtatgcacctgtagtcccagctactcaggtggctgaggtgggaggctcacttgagcccagtaggtagaggttgcagtaagccaagatcagaccactgcactacagcctgaatgacagagggaaaccctgtctcaaaaaataataataataatagtaattcagtaaatcatgctgtaaacagatgtgctgtcattcagacttttttgttacaattatagagcaatagagtagatttagcataattcttttttttttttttttctgagatgtagtgtcactctactgccaaggctggagtgcagtgccacaatctcagctcactgcatcctctgcctcctgggttcaagcagttcccctgcttcagcctccctagtagctaggattatgggtgtgcaccaccacacccggctaatttttatatttttagcagagacagggtctcaccatgttggccaggctggtctcaaactcctgacctcaagtgatctgcctgccacagccttccgaagtgctgagattataggcgtgagccaccgcgactggcccaacttagcataattcttacgagccctaggattttcagaatggtcagtgagcactggctccaacttaaagtcattggttgcattagtccctaacaagagtcagcctgggccaggcacagtggctcacacctgtagatagtgtggagttatgcagacgactttacagataagttactcaacaactaaagagatgagaggagtttcctataaaaacttttaaaaaatcaggccgggcatggtgcctcacgcctgtaatcccagcactttgggaggccgaggtgggtggatcacctgaggtcaggagtttgagaccagcttgaccaacaaggtgaaaccccatctctactaaaaatacaaaagttagccgggcatggtggcaggcacctgtagtcccagctactcgggaggctgggacagaagaattgcttgaacctgggaggtggaggttgcagtgagccaagatcatgccactgcattccagcctgggtgacagaacaagactccatctccaaaacaaacaaacaaacaaaaaacacacaaaaaaacttctggccgggtgcggtggttcatgcctgtaatcccagcactttgggaggccaaggtgggtggatcacctgaggtcaggagtttgaggccagcctggccaacaaagtgaaaccctatctctactaaaaaatacaaaaattagccaggtgtggtggcaggtgcctgtaatcccgctacttgggaggctgaggcaggagaattgcttgaatccgggaggtggaggttgcagtgagccaagatcgcaccattgcactctagcctgggggacgagagcaagacttcatctcaaaaaacaaacaaacaaacaaacaaacaaacaamccaaaaaccttttaaattaaactgtaaaaacggcagcccacttgggctcccctctccactatagatagctttcttctttcatttattaaactttcactccaacctcacgctttgcatccacattccttaatttgcatggtcataagacaaagaactcctggtgatactacacaacaagagactactacattatggtatattgatgagactgtagcagtatttagagagatccaacatatatttcaagtcttttttcatctgaagtcacacaggatgtattttctctctagaaatgaacatatgtgaaatgtctctgctcagggaagcccattcaggtttcagagtctaaggcttttatcagggaccaatcacaaagacatatcctgttatgcgattagccatagcaaccaaaactcaggatcacaacaatgagaccaggggtacatcatcaatctcaatgtttgtgcaaagcaaattagcaagccagyatggcatggtacattgctccaagtgtacacaacaaaatcatcaattagtgacataaagaacatcctaagaacatttccgagggtttgccaagggtcaatcatgattccaggctcccttggaggtgtaaggactgagcaactagacctacttgctatgtagatttatctcagaaatggcctcttaaagagaattctcatcattctagwacctcatttgtcaacaggatttatacactaaaattcaatcttcctaaagaattgagaacaaatttaataaggagtaaactcagattgcaaagataattgtaaagaagttaatggaggaagtcctagccagagcaatcagacaagagaaagaaataaagggtacccaaattggaaaagagggagtcagactgttactattcactcattatatgattgtatacctagaaaaccctaaagactcatccaaaaagctcctagatctgataaatgaattcagtaaagtttcaggctacaaaatccatgtacacaaatcagtaccacagctatacaccaacagcgaccaaactgagaatcaaatcaagaactcaatcccttttacaacagctgcaaaaaatatatacataaaataaaatacttaggaatatacttaaccaaggaggtgaaagacctctgcaaggaaaactacacaacactgctgaaagaaatcataggctgggtgtggtggctcacacctgtaatcctagcactttgggaggccaaggcagatggatcacctgaggtcaggagttcaagtcaagcctggccaacatcacgaaaccccgtctctactaaaaatacaaaaagtagctgggcatggtggcacatgccaataatcccagctactcgggaggctgaggtaggagaattgcttgaacccgggaggtggaggttgcagtgagccaagattgtgccactgcagtccagccagggagacagagtgagactctgtctcaaaaacaaacaaacaaacaaacaaacaaaaaagaatcatagatgacagaaacaaatagaaacacatcccatgctcatggatcagtagaatcaatattgcaaaaatgaacttactgccaaaagcaatctacagattcaatgcaattcccatcaaaatactgccatcattcttcacagaactagaaaaaaagatcctaaaattcatatggaaccaaaaaagagcccacatagccaaagcaatacaacataaaaagaataaacctggaggcatcacattacccaacttcaagctatgtgccaagcctgtggttaccaaaacagcatggtactggtatgaagataggaacataggaccaatggaacagaatagagaacccagacataaagccaaatactaacagccagttgatctttgacaaagcaaacaaaaacataaagtggggaaaggacaccctattcaaccaatggtgctgatataattggcaagccacatgtagaagaatgaaactggatcctcatctctctccttacacaaaaatcaactcaagatggattaaagacttaaatctggctggtgcggtggctcacacctgtaatcccagcactttgggaggccgaggcagggggatagcctgaagtcaggagtttgagaccagcctggccaatatggtgaaaccccgtctctactaaaaatacaaaaattagttgggcgtggtggcaggtgcctgtaatcccagctactggggaagctgaggcaggagaatcgcttgaacccgggaggcagaggttgcagtgagccaagatcacgccactgcactccagcctksggacagagtgagactgtcaaaaacaaaaacaaaaacaaacaaaaaaaaaccacttaaatctaagacctgaaagcacaaaaatgctagaagaggccaggcacagtggctcatgcttgtaatcccagcactttgggaggctgaggcgggtggatcacgaggtcaagatttcaagactagcctggccaagatggtgcaatcctgtctctgctaaaaatacaaaaattagccggtcccagtggcaggtgtttgtaatgccagctactcaggaggctgaggcaggagaatcacttgaactcagggggcagaggttgtagtgagccgagatcgtgccactgcactcaagcctgggcaacagagttagactctgtttcaaaaaaaaaaaaaaagtgctagaagataccatcaggaaaactcttctagacattggtttaggcaaagagttcatgaccaagaacccaaaagcaaatgcaacaaaaacaaaaataaatagatgaagcctaattaaacaaaaaagctctgcacagcaaaagaaagaattaacaaagtaaatagacaacccacagagtgggagaaaatattcacaaactatgcatcccacaaaggactagtattgagaatctacaagtaactcaaataaatcagcaagaaaaaaccaaataaccccatccaaaagagggaaaaagacatgaatagacaattctcaaaagaaatatacaaatggccaacaaacatatgaaaaaatgctcaacatcactaattatcagggaaatgcaaattaaaaccacaataagataccagcttattcctgcaagaatgcccataattaaaaatcaaaaactaatagatgctggcatggatgtggtgaaaagggaacacttctacactgctgacgggagtgtaaagtagtacaaccactatggaaaacagtatggcgattccttaacgaattaaaagtagaactaccattccatctagcaatcccactactgggtatctacccaaaggaaaagaagtcattatatgaaaaagacacctgcatgtgcatggttacagcagcacaattcacaattgcaaagatatggaaccaacctaagtgcccatcaaccaacgactggataaagaaaatgtggtatatatgcaccttggaatactactcaaccataaaaaggaatgaaataayggcatttgcagcaactggatggagtgggaggccctaagtgaagtaacttaggaatggaaaaccaaatattgtgtgttctcacttacaaatgggagctaagctatgaagaagcaaaagtacgagaatgataaaatggacattggactttagggactcaggggaaaaggtgggaggggactgagggatgaaagactacacattgggcacagtgtacactgctcaggtgatagttgcactgatatctcagaaatcaccattaaagaacttatccatgtaaccaaaaaccacctgttcccccaaaagctattgaaataaaagaaaaaaagaagaagtggctgggcatggtggctcatgcctataatcctagcactttgggaggccaaggcaggcagatcacttaaggccaagagtctgagaccagcccagccaacatggggaaacccgtctctactaaaaaaaaaaaaaaaaattagcagggtatggtggcgcatgcctgtaatcccagctagttgggaggctgaggcacgagaatcgcttaatcctgggagscagaggttgcagtgagccaataacktgctgctgcactcttacctgggcaacagagtgagattctgtctcaaaaaaaaaagaagtgaatggcatcaatcgtgaaaggtatcacataaatatgaaaggttacacaactcttttaacctatttgcctagaaaagagtggtaagtagggcttattgagttgttttattttattttactttttattattcatttgtgtattaatttattctttggtgacagagtctcattctgttgccaaggctgcagtgcagtgacatgatctggcctcctaggatcaaacaattcttatgcctyagcttcccaagtagctgggattacaggcgtgtgccaccacgctcggctaattctttttgtatttttaatagagatagggtttcaccatgtcgaccaaactggtctgaaacccctgacgtcaagtgatccgcccatctctgcctcccaaagtgctgggattataggcatcagccaccacgttcagctaatttttacatttttagtagagagggggtttcaccgtgttggtcaggcttgtctcgaattcctggcctcaagtgatccgctggcctcagcctcccgaagtgctgggattacaggcataatttaccgtgctcagccattgtcatttattttgaatttgggagaagatatcacacccatttctatgttctggagcaggaagtctatcttctggagcagcattgcagtctaaatcactccttagttcagctacatccgagttcttatcccaggaccaagaagaataaggaacacagacaccacagagtaagtagagtaggatttattaagcaaaaggaaagctctcagcaaagagaggtgccctgaaagcaagttttcagaaatggggctgagttctgggtcttttatgtggaagaggaaggaaggaagtcttctgtgggttctgcccaaaatgggaggggtaaagttccctcctaagggtgttgcatctgcacatgcctgggattggccagagtgactccatcttggttgttacccacgagtgcctaagtgaaacccaccaaggggctaaaaccacaaaaatgtcatgttaatgacactatgatgakctgggccaaggacacttaggttgatttattccgcctgtgcctaagttaggacagtcccttctgagcaacatcctggcataaggggaagttcttaaccacatttcttcccattagctgcagaggcggtgtaggtackgtcctgctagcgttcttgtgaacactgcccttctccagagaccctccctctctatctgcctaaccagcctctaactgccttctctctcagcaggaagtctatcttctatcttgggatgacttgaaagataacccaataggagcccagaacctaggcatccaagaataagagaaacgaacatgtgtcagatggagaaaacagaaactatggacatcaaaaggctaaattagggccagatatcaaggtcacactggtgcttttaggaaagtgaagtgtaaacagctgagagtagaactacaatgtagatgaggaagcaaaaatgcttagtatagggaaagcgcagaggcagaaaggaaaatagaacccacaagaattgtattttttcttcttccttcttctttcctatttctcaataaatacttacagaatacctataaggcttcattaagtatgtaagcactaagaatatttaatatgtgtcatgaagagtgatcttcaagtaaacatgactcacatgcatctggtgatcttcctaacctgtgtaaaacccttccatttgttgaatttggcaccaaaggctcttaaaggccatttgttgggaatgtgtggataataggctgacttacatctgtaytggaaaaactctatctttgcctttggagaattatggacgtttggttttttacctttagcggatagaagggcagcaagatttgtcatgtgctgtttaaaatctgaatctgggccaagcgcagtcactcacacctgtaatcgcagcactttgggaggccgaggcaggtagatcacctgccaggcctctgtccaggtcaggaatttgagaccagcctggccaacatggtgaaaccctgtctccactaaaaatacaaaacctagccaggcgttgtggtgcacgcttgtaatcctagttactcgggaggctgaggcaggagaatcgcttgaatccaggaggcgaaggttgcagtgagctgagatggcaccactgcactccggcctgggtgatagagtgagacaccatctcaaaaaaaataaataaataaaataaataaaaataaaaactgaatctgggaaaccccagggtcaatttctttactgatggttttaacaagttagatcacctgacttgattatgtggccaaagggacagaaaacccagctggaaacttctgctttaccgctgtgcgtgcgcgcacatgtgtgtgtgtgtgtgtgtgtgtgtgtkttttctcttttccccctacactacacagaagtaagttagcctctcctgaagccaagtttccttgcacttgataggtcaatctggtgatgaagtcgcatcccaccataaygaccctggggaatttgtgtttattgttgttttaagctactatgttattggctaatttattttttttatttttatttatttatttatttatttgagacagagtctctctctgtcaccaagccagagtttagtggtgcaatctcagctcactgcaatatccacctcccgggttcaaacgattctcctgcctcagcctcccaagtagttgggattacaggcgcatgcccagctaatttttgtatttttagcagagatagagttttatcatgttgaccaggatggtcttgatctcctgacctcgtgatctgcccacctcggcctctcaaagtgctgggattacaggtgggagccactgtgcctggctgttctgggctaattttctatgcagcaatagatagatagctaattaatcaaggtatgaatctgggtatctggatgaaataaggctgaatagtacctttattttgtgtttcagagagtttgtacagcccctcacccctgcaccctacacaacataaaagttttgggatgggtgagaagtctgccttattttgtatgctaggagaagggggactggaatactagcagaccatagacacattcccaggtaggtcaattttacggagtgcaaatggaagctgagactcagaaattggtcctttcaagctgttcctgcccatgtacatcatagaaattcttcaagttcccccaagggtacacatcgcaatttgaccaccattggagaggaggtgctatgccattttgggaaatgctttaaacaggaaacagtgcatgtgattaaataaaccctattcagaaaggttccagtagattcagtttctgcttcttaggctacactcaacacggaaagccatcagaaactagggtcaaggctcaggcaggtctccttgggacaatagaacacatcatgcattggccctgcctcctgcctttgaagtttctcttccctgagaggtrgaagacgggtgtcagattgcatggttcgttttagagarcgttattttttctagaataacttcctggtagtgtgtagrttgtgtgacagagaacttctaattgtttctctcttcctcatacacatttaccaaacacagaacatcttgtccttcacacatttcacatggcaattctggatacatttagtcaacataggacatttcaagacatgattctacaatggctatttcaccagtgcataatcacatttttttaatcttcttttttttttttttttttttttgagactgagtctcgctctgttgcccaggctggagtacagtcactccatctctgctcactgcaacctctgcctcccagattcaagtgattctcatgcctcagcctcctgagtagctgggattacaggcatgcaccaccatatccagctaatttttgtatttttagtagagagagggtttcaccatgttggccaggctrgtctccaactcctgacctcaggtgatctgcccacctcagcctccgaaggtgctaatagctgactttttatttattttttgagatggaatctcactctgtcaccagtgcagtggtgcaatcttggctcactrcaacctctgcctcccaggttcaaatgattctcctgcctcagcctcccgagtagctgggactacaggcgcccgccagcacgcccagctaattttttgtacttttagtagagacggggtttcacgatgttggccaggatggtctggatctcttgacctcgtgatccgcctgccttggcctcccaaattgctgggattacaggcgtgagccactgcgcctggccaatagctgactcttaataaaggacgaagatagcactccttctcagctgtctgcagttctttatatwttggttaactctcatggcttcaattaccacctgtgcatctataacaagatgccaaaagtggctgcttctgttgaatcaaaatcaaggactaacgtcaaaagccgaggcaaagaagaaccaagaaagatatgttttaaagagagccacccatcactggagctagattctacccctgggtttactaacgaacagcagaatgagccttattcatggcagctttcaccctatcctcaactcccgtctatagaaaagaggctggggagaagtggagcagacagaggaaatgagagttgcccttggccatgtggtatttctttccttcacaaaactaagtgagggtggccagacgcggtggctcacacctgtaatcccagctctttgagagaccaaggtgggcagatcatttcaggccaggagttcaagaccagcctggccaagatgatgaaaccccgtctctactaaaaatacaaaaaaattagctgggcatagtggcacatacctgtaatctcagctactcgggaggctgaggcagaattgcttgaacccaggagacggagcttgcagtgagtcgagatctcaccactgcagtccatccagcctggactacacagcaagactccgtctcaaaggaaaaaaaaaaaccaaaaaacaaaaaactaagtgagggagaagcctccagtagaaacgctgagagagactgggggtgcctgcaacaagtagacaggcatttcttttttttttttggagacagagtctcactctgttgtccaggctggaatgcagtggcgcgaccttggctcactgcaagctccacctcccgggttcacgccattctcctgcctcagcctcccgagtagctgggactacaggcacccgccaccacgcctggctaatttttttttttttttttgtatttttagtagagacggggtttcactgtgttagccaggatggtctcaatctcctgaccttgtggtccacccgccttggcctcccaaagtgctgggattacaggcgtgagccaccacgcctggctgcatttcttttcttttttttttttttttgagacagagtcttgctctttcacacaggctggagtgcaggtgcagtggcacgatctcggttcacagcaacctgcagcctccgcctcccgcgttcaagtgattcttctgcctctgcctcagcctcctgagtggctgggattacaagcgcccgccaccacgcccagctaattttttgtatttttagtacagacggggtttcatcatgttggccaggctggtctcgaactcctgagctcaagtgatccaccccccacccctcagcctcccaaagtgctgggattacaggcgtgagctgccacgcccggccagacaggcatttcttgcctcaactgaaccttggcttcgagatggcagcacaagagagagggcaaccttggagtagttgctgctgcttgctggttgggtggcagggatacacatgttttcttggaccttagctggccccaagacatagttggtcaggtaagggaactccagcagtaagagtcagaggctaggcagggtgtgggtggggtggaatgggagtcaagaaaatgaaagccagatttcacctcagtgtggtagaggaaataatgaagttgactctatccccgcctcctgaccgccacctcttttggttcctcaagctgtagctctaagcaaggaatgaaggatagtgtcttagtccattcaggctgctataacaaaacatcataaacagggtagcttgtaaacaacagaaatttgttcctcacaattctccagaaaagttgaagatcaaggcaccagcagattctgtctggtgagggcccactccctggtccacgaaccctcatgtggcagaaaaggccagggtctctctgaggcctctttcataagggcacaaatcccatccatgagtgccccaccatcataacctaatcaccttccaaagctctcacctcctaacaccatcaccctggcagttaggatttcaacatacgaattttggagggacgtcaacattcaggtcatagcagatagggaagttttgaattaggtatgtgattgtggttttcagctggactgaactcagttttcacactgaaagtgaggaatctaaatggaaaatcatgatatctgtccagcatgttgttaaagtataggaaaaggggatttagtakaatatggttgaaagcactgatttgaggaaaaataattttttcatatatactccccactgagttgagactcataaaatggttactggttgaggacaccaacgttttctagctacagattctcagtggcctcctgggcatctccattgggataccaggtcaggctctgtacagaagagcagagatagcagtcattggtgtgcgcccaggagccaggctgactgggtgatttctcagctctacacttagctagctctagaacccttggcaggttgtttaacttctttttgcttcggttttttcatttgtgaaattaggataataatagttctttatgatatcattgtaagggataaatgatttaagttgttggagcatagcaaatgatggaccagggatttaaacccagttttatgtgactctagagtctgtgctgtcaatcactggatatacccattgttaaaactgattataggccaggtggagtggctcatgtctgtaatcccagcatgttgggagactgatgcagaaggattgtttgagcccaggagttcaagaccagcctggataacatagtgggacttggtctccacaaaaagaaaagaaaaaaaagttagccaggcatggtggcatgcacctgtagttctagctagctacctgggaggctgaggtgggaggatcacttgagcccaggaggtcaatgctgcagtgagctgtgattgttccactgcactccagcctgggtaacagagcaagaccctgtctcaaaaaataaataaaatagattatatgttaaaagcatattttgtgtgtgtatatacatatatacacatatatataatatgaaaatatattattaaaattatttccaattaattttatgtttctttttccttatttattgtattttattattatttttgagacaaggtcccaatctgtcacccaggatggagtgcagtggcacgatcatggctcactgcagccttgacctcctgggctgaggtgatcctcccaccttagcctcccaagtagctgggactacaggtgcacaccatcacacctggctaattttttttctttcattttctttgcctttgtttgtttgtttgtttgttttgtagaggtcccagtatattgcctaggctcatcttgaagccctggactcaagcgatctttccaccacagcctcccaaagtactgggattagaagcatgagccactgtgcctagccttttcactttttttttttaaagaaaatgtggctattagaaaattcaaaattacaaatgtagttcacattctatttctgctggacagtgcagctttgggctttgtcatcccttgaagtgttctaaaatggtaaacatctcacctccaaattttttttttttttttttagatggagtctcaccctgttgtccaggctggagtgcaatggcatgatctcggctcactgcaacctctgcctccagggttcaaacgattttcctgcctcagcctcccaagtagctgtgattacaggtgcccaccacacccagctaatttttttgtgttttttgtagaggtgggggtttcaccatgttgtccaggctggtctcgaactcctgaccttgtgatctgcccgtctcggcctcccaaagtgtcaggattacaggcatgggccatcgcacccggccaaacttccaaaatctttttttttttttttgagattgcagtggcgcaatctcggctcactgcaagctccgcctcccgggttcacgccattctcctgcctcagcctcccgagtagctgggactacaggcgggcaccataatcatgccactgcactccagcctgggcaacagagtaagaccctgtctaaaaaaaaaaaaagaaaaaagaatgaaagaaagaaagaaagagagagagagagagaaagagaagagaagaaagaaagaaagaaagaaagaaagaaagaaagaaagaaagaaagaaagaaagagaagaaagaaagaaagaaagaaagaaaataaactggccaggctcatgcctgtaatcccagcactttgggaggccaaggtaggaagattacataacactaggagttcaagatcagcctgggcaatatagcaagacccgttctttccacagaggtgaaaaattggccaggcatgatagtgcatgctgtagtcttaactgcttgggaggcggaggcaggaggagtgtttgagcccaggagtttgaggctgctgtgaactatgattgcaccaccaatctggaatgtacactagaatctttatagtgtatatgtattcctcaacaatacatcgagctcctgaccttgtgatctgcctgccttggcctcccaaagtgctggtgctgggattacagtcgtgagccactgcgccccatgtgaacttttaaaaatacattcctgagtcctatctatgaattgccttttgcccatttttctgtgtatttatttttccatttttattgaagttaaataaaatatattatgggtaataatccttccagtgatatgatatgcagatatcttcgttttgttggtcatttcctttggcatcatctttcatttactttatggttatcttttgatagatgctcttcatttattgcagttcaatttctcaatcctttcctttgtcctgtgtttttcacacattgtttaataaatattttccccctctagtgtcttaaaatattttcctattttggcttctaaaagttgttataattttgccttttacatttagggctttaattctctgaaactgtgtttttgttgctgttgtttcagaaccattttcccaggagccatctttttttctcctctgatctgtggtggtgttccaccccagtcatgtttctgtgtatgcataggacttcattcctggttttcctttctgtttcatagacctactttttaaaaaaaccctatagctaatactaaatttttttttttttttttttttttttgagacagagtctcgcagtgtcgcccaggctggagkgcagtggcgcaatctcggctcactgcaacctccgcctccctgcaacctccgcctccctgcaacctccgcctcccaggttcaagcaattcccccgcctcagcctcccgagtagctgggactacaggtgcatgccactacgcccagctaatttttgtatttttagtagagacagggtttcacagtgttggctaggatggtctccatcwcttgacctcgtgatccgcccacctcggcctcccaaagtgctgggattacaggcgtgagccaccagcacccggcctactaaatcttacaaacaagagtgtttgactgtgcttggccctttattcctgtataacactttttattgtttatttaggtggttttataactttgacaatcagtagtttgttctcattcacattgactgtagattttttaaagtggtgacaggtacatgagttaccaaggtagagagcttgtttggtgaatcttcatcctcattacatttctggacaatgcatatggagacggtatgggacactccttattcctttggcccagacagcttccttgagcctgctgtccatccacacatttggagtccccatcaccctatggcaaatttctgaatatcttagacagcttgaggggcatgcttcttggagctcactgcatggatgcaattatgaatattgatggcagtattcttaggtcaccacctgtggatggcaaaatggcccttcttcacctctcctttctttgccagcgccattctgccaggttcaagttgaaaagaaagactgtgagcaattccacaatactttcagaatcagctggagatattgatccttcttatccaaaaataggttatgtctctcaacttatttaggttttctttaatgcagctcaataagattttataattttatccaaagaaggatttatatgcctttcgttaggtttattcctaagcacttgaaatttcttgtaaaatatgtctgttctgtgtgtattttcccccaatattttattattataaactttcaaatgcaaggaaaattttaaaagtacaatggaagccaggagtagtggtacactcttgtaatcccagaattttggggggctgaggtgagaggatgacttgagcccaggagttgaagcttgtaatgagctatgattgtgccactgcactccagcctgggcgatggagcgagaccctgtcttaaaaaaataaataaatgaaataataatacaatgaattagctacatgtccttcacttagactcgatcactgttaatttcatcatatttgtcttaacatctgtctttgtgtacgtaattttgggaggctcattttaacaaactgcaagtggtagagtcatcatttgtaactagaaaatctaattttagggacacaacaagatgttccaggcataccttatattttctttactttttcttttcttttcttttttttttttttttttttgagatggtgtcttgctctgttgcccaggctggagtgcagtggcaccatctcggctcactggaacctccgcctcctgggttgaagcgattcttctgcctcagcctccagagtggctgggattacaggcacatgtcaccatgccgagctaattttttatatttttagtagagacaaggtttcaccattttagccaggatggtctcaatctccttacctcgtgatccacccacctcgacctcccaaagtgttggtattacaggcatgagccactgtgcccagcctgtattttctaactaagcattcacaattgcccatttcttaccctctgctttgtcttaaccaaagccttctctttttcctatgggcccctgaactctgcttgcctccagatctgagcaaaaagaagtagaacttgccctttatcagcttctcctgggagtcggctaatcacatcgagcccactttcctgtcagatctactggtcatttcttcttacttatctagcttccccttaaaagaggctcttatctctgcttcctctcccctaccctaaaaggaaacttttttctgtttgagtttgagatgcttatacatttctgagttcagagtgctctccctatttgatatggttaggctttgtgtccccacccaaatatcatcttgaattgtcatccccgtaatccccatgtgtcaatggagagaccaggtggaggtaattggatcatgggggtggttcccccatgctgttctcatgataatgagtgagttctcacgagatctccctttgctcagcacttctccttcctgcctccctgtgaagagatgtcttctgccatgagtgtaagtttcctgaggcctgcccagccatgcagaagtgtgagtcaattaaacctcttttctttataaattacccagtctagggcagttcttcatagcagtatgagaaccgactaatacactattacaatagtctttctctctagttaaattatttccctaggctggttgcagtggctcacgcctctaatcccaacactttgggaggccaaggcgggtggatcatctgaggccaaggagttcaagatcagcttgggcaatatggtgaaaccccatctctaccaaaaataaaaattagccagtctcataacccagtctcaaaaaaataaataaaactttaaaaataggccgggtgcaatgactcacgcctataatcccagcactttgggaggtaaagcaggtggctcatctgagatcaggagtttgagaccagcctggccaacatggtgaaaccccttctctactgaaaatacaaaaattagccaggcttggtggcacgcacctgtagtcccagttacttgggaggctgaggcagcagcagaatcgcttgaacctaggaggcggaggttatagtgagctgagatcatgccactacactccagcctgggtgacagagcaagactctatctcaaataataataataataataataataataataataatawtaataawaaaataaaataattttaaaaaatgatctccttaagtccagatttatttttattggacatttctgtgccccagacctggaatgggccatttttccaatgaaaagsaaattattcmttttagtgtgtactggtttatttttggtgccagctgcttcctcttgttgttttcttcccccagcaccaatctggcactggagtcatacctccctggaggtttcaaaagccttttttttttttcttgtaagtgtttgccccttgtattctttgaataaaaacattatgtgggcagggaccatgctttattttttaattgaggacgtatattttatgtcttatgtcaccgagtggaaatacagcaaactacctggcctctcagatttctgccttcagttccataaatcctcttaaactaagagagtcacccggtcactttcggatgggacagatacctcagtttattyacatttttcctgacttttcttaattccttcttgtgaagtcagaaactgaaaagtctgagattttctgctacttgcaagctaacaagttaccgtgccacaattttttttttttttttttagacagagtctcrctctgtcgcccaggctggagtgcaatgcagtgatctcggctcactgcaacctccacctcctgggttcaaggaattctcctgcctcagcctccagagaagctgggattacaggcgtctgccaccatgccygactaattttctgtatttttagtagagatgrggtttcaccatgctggccaggctggtctcgaactcttgacctcaggtgatccagccacctcggccttccaaagtgctggaattacagacatgagccaccacgcctggcccacaaatttttatatacatcgtgttagaaaacaggagatctctgagtcagagacaaagacgtgtattcacagtaaaagcagcagccaaggtgacttcagagcttggrttccctgagccccaattcccataaggcaacatagggagggccagatggtacttacaggtgctttcaggtgcaatacaggaggcgaagtctgagtttaggaggctcacattttgcatagggctgcaggaaaatctgcccatcctcccttccagagagaaacattctacactggaatgtgagcaaatatttctggggaaagatgtctgtaaatctctcggtgaaagttaccgttttgatctttatttatctaggaatgtaaatacatttgcttcaggggaagtccttgtctttatytctccagggctgcctgcttgcactaggcattcctagaaagataatcctggcacacaggagcgaaacatgtaggagtgctgaagattcacagacagtcgtctcaatgtctctgaagttttttttcccttaaacttctccttttggacattccccttcattttccttttaaaaatctcatcctttccaacactttcagttgtaagaatttccawatcaagcactcaatatcaaaacaatgtgtgtgacaaacttaaagtgttgaatctgactatgtcagcagaaagcataattatcgatgatgtatgggacagcaatcttgaattaaagaagaaggtgggaaagccccaaatctctcataaattatgatgatgatgatgatgatgatgatkatttagcacacctctgctggcaggaaacaatttattttaaagatgacctgttacattaggtatttgtattgaatgttaccttatgtgttgaaaagggagtgaagagagaatatatatgtaatttcttgtgtatggataacatcgatgtaagtacaaccaaaataccaatgtaagatctgtacaccaacctaataacatgagcatgattgataggttgatcagtagtttggcttattgttcaatgaatatccactcccctctcccttctactgtrggaagattatacttcttgggcctggccctgtgacttgctctggcaaatgtactactaatggaaagacaggagagagaccttgaatatgtttgacttggctcttggtttgacatagctctcctagtcctgccattgttcataagaacaacatgtcccaccagcactgcttcttcagcctgggtcccagaataagactcasgaaacagatatgagcacaacctgaaccccagagcctaggcatctgagtgtcagtctgaggcacaattatcagctgacctgcagatctgccagtaagataaataaattcttggccaggcatggtggctcatgcctgtaatcctagcactttgggaggttgaggcaggtggatcacctgaggtcaggaattcgagaccagcctgacaaacatggaaaaactccatctctgctaaaaatacaaaattagccaggcgggtggtgcatgcctgtaatcccagctactcgggaggctgaggcaggggaatcgcttgaacccaggaggaagaagttgtggtgagctgagatggcaccattgcattccagcctgggcaacaagagtgaaactccatctcaaaataaaagaaaaataaattcttaaattacctgggcatgttggtgcatgctataatcccagctactcgggaggcagaggctgaagtgagctgagatcacgccactgcactccagcctgggcaacagagcaagactcctaaaaaaaaaaaaaaaaaggaattcttgttgtaagccatttggttttggtatgtatgtgttttgttgttgttgttattgttttgttttgtttttttttttgagacggagtcttgctctgtcacccaggctggagtgcagtggcgcaatctcggctcactgcaagctctaactcctgggttcacaccattctcctgcctcagcctccagagtagctgggactacaggcgcccaccaccatgcctggctaatttttgtatttttagtagtgacgggtttcaccatgttagccaggatggtctcgatctcctgacctcatgatccgcctgctttggcctcccaaagtgcgggattacaggcatgagccaccgtgcccggccctaaaaaggggaggcatgaataatccaccccttgtttagcatatcgtcaagaaataaccataaaaatgggcaaccagcagccggctgctctgtctatggagtattcttttattcctttactttcttaataaacttgctttaactttattctatgaatgtgccctgaattctttcttgtgcaagatctaagaacactctcttggggtctggattggaacccctttccagtaacatctttctgacgacccagaggggactatagtgtggaaactcccaactcaaaggctaactttggttaagtgttggggtctgataacatctttctcatgaaccacaartgggacaatactgaaaatacttctcaacccaaaggaaacagactgcagcactaattggccaactttgggtaattggggtacccaagtaaaggatgggattgggttagaggtgcaacttaggggagttagagtctctcctgaaacagagtgggttagagactcatcttaataaaaggcaagaacgcttaaccaaccttgggttagaggcccaaattagaagagttatcccttctaagatttagggagttagaggcctctctcagtaaagtccttctyggctaagaatgggtttgacactattaactgctattctctttcaaataatctgccttgcactctttgctgacagctatgggtgacaggattaggcatgaacaggatcgtgggacatggggagctttttcttccctaaaaggggaaacttgagagctgatgggactgctgaaaaatatcccttcacagctgacaagcggccacctgaacttttgattcagtgttgctggaatgggtgggtctttctctcaactccctgagatcttcaccttccccatcctgccacaggcaaggcttttctctctctcctttccctttcttattttttctattactcagggtaaccatcyttcccagagatcacaagtcaaaactctctggtcagaggttggattaaygatgatggggyccaacagggggcaagtttgagccttgccagtttgatattgggtgctaagcagagtggcaggtcataaactgcttctttgacttttacaaattgttcaatttattttattctattttatttatttatttttgagatggagttccatgctgttgctcaggctggagtgcagtggcacaatcacagctcaatgtaacctctacctcctagattcaagtgattctcctgcctcagcctcccaagtagctgggattacaggcacgtaccaccatgcctggctagtttttgcatttttagtacagacagggtttcaccacattgtccaggctggtttctaactcctgacctcaagtgatccgccccacttggcctcccaaagtgctgggattacagacctgagccaccatgcccagcctcaattcattttaaagcattaaattctagataaggcctggggatatatgggattagccatgccccctagctatacaaagaaggttataaagaaaaagattttatataacaaaggatcttgtatggtaaattcttgttctaaagtaaaatggttgtttgacaagaggtatgtttaggacaagtccraaagtccaagcatgtcataaatggtctgtgtaagtcataaaaatatgaaaataatttatgcaaaaaatgttgtacaatttaaaggtaattaggcttcctaaatgtgtcataaaatgccactataacttgtaactgtaaaactttcctgctttacagctaggtaaggcctgggacacgtaaatgctaaaaaaaaatcagaccttatctgcacttctgtctgctgtcctcggctccatacctaattaaaaccctgaacttaccaaggttttcaccaaaagttaaagtcactaagagttaacagtgtaacatgtatttgtgactactgaagaaacagttttacatgcaaggtgtgtaagaaaagtaaactttgtttttagtaaaaaattataaaaaggcatgggcatgtattttttttgcctaaagggttaaaggattgctttaagtgaaataggaaaattctaaaggtttaaacaagttgtaaacgttttataaaaaaattaattataaaaaaaatctatgtgtgaacagattggctaaagttaaaggggtattattcagttttaaactaaacattggaataaaagcacaacaggtttttcttaaagcaaaaacctgcttttactctgctctttaacaaatattgtaaaggtagttataaaagaggtttataaaaatcttaccttatggtcaaactgattaaatacatttgtctataaggttttattaaaaactgggtttgacagtaatagtacactaatgtaaaagtgacatttggcttattttatataaaaatcatacaagaagcactgtcaaatataaaataatgtttagcttctttgggctatatttgtataaatatgttattggtatgtgttccaaaataattctaatataacttagtgtatattattaataattataattgttacataaaatcattgtatgccacagaggtaaccaaatttctttgtcaattgtgtttttaactgtgactgtcctaagacattttgtcatccacggacacttgttgttttattcctctttaaaaaaatggtttataatcagctataggactctaacaggtgctcttaaattcaggtttctaatacctttgaacactgtaatattaaaatacaggaaaaaactttcggactcayggaaagctgaaatgttcataaatatcaaacaggaattaactgcatggactaaactaatagaagctatttacagcttttaacaattaagtatactcctgtaaacaaaacgtggatcatatttgtttctctctaccagatttctctaaaatatggaaactatttgtaagtattcttaatttatggcaatatagttatttgcataagtgcaataaaaatccattttcttttgtaacaggatgcaattggaaaaactggttattttaccaaggctttaactggaatggtgtgttttcctttaaggaattaaatttaacttatagggccaatacaagtcccttgggagaactggcctcataccttgcctacacagtccctgcacagggtttctgacctgtgataagtaaagaatgtcactttctaacaggcccagaagccccaggttatcttggaacctcaagaggagaggaatttacctagctcataggtatttaagcatacaaaccaatggcagggctcggatctaaaaaaatcttatctaagattccttctatggaacagagttccaatttacaaaaagcttatgtgaaaaataattattcttgctacactttatrcaaacaatcaggccaagtataataaagcaagttggtgttaccataatttgtctttaataaaaatgggaaactggagacagaaaacttaatgtttcaagaactgtggtacacttgttattaaattctagtctcatcagttgctttaaatttttttccctgcaaattaaactgactctgcttattcctgtaaatcaaccagtaatctctaactgctgctcaaaagaaacgagaggatgggtaatgtcaaaatctgaatcaatatctaattctgggcacatactggaatcatctagcaaccccctatcagcttggttctaacacttgcccagttgatagaaagccttctaacttagttaagttgggataattttgcttatgttgttttagtgtggtgaaatatattgctgttgtactctttgtatagcaatgcaaaataagcttactcaatgttttcttaaacacttattaatcttccaaatatcaccttttgttggaactcaaaagttataaatggccctcaacataccaatgctttctttctttctttctttttttgagacaaaaatctcactctgtcacacaggctggagtgcagtggagcgatattaactcactgcaacctctgcctccttggttcaagtgattctcgtgcctcttcctcctgaatagctaggattacagacacccgccaccacgcctggctaatttttgtatttttagtagagtcggggtttcaccacgttggccaggttggtctcaaactcctgacctcaggtgatctgcccacctcggcctcccaaagtgctgggattacaggcgtgagtcactgcrcccaggccaatgctttctaactaagctcctctctaccgtaaacacaaaagaccctaatagttaggcaggaatatcattgcccctattcagcataaagaagttacagaaaatggatctttgtccctctgcagcccttaggattaagggttctcttataaaaggaaggtgggaaatgtcagaggcattggaaccagagcaactccatcttgaaaaggggctgggtgaaataaggctgagacctactgggtggcattcccagacagttaaggcattctgattcataggatgagataggaggtcagcacaaaatacagttcataatgaccttgctgataaaacaagttatagtaaagaagccagctaaaacccaccaaaaccaagatggtaccaagagtgacctctggtcatcctcactgctacactcccaccagtgccatgacaacttacaaatgccatgacaacrtcagaaagttattatatatggtctaaaaatgagaggcatgaataacccaccccttgtttagcatattaagaaayagccataaaaatgggcaaccagcagcccttggggctgctgtctatagagtacccattctttcactcctttactttcttaatacattgttctcactttaatttacagactcgccctgagttctttcttgcacgagatccaagaaccttctcttggagtcaggatcaggacccctttccagtaacaaaagtagattagagattatcagaggttggggagttattgcttaataattagagtttattttgggcatgttgaagtttcagaagtaaatagtggtggtggctgctcaacattgtgaatatcattcattaataccactaagctatacacttaaaaaagccaagatggcaaactttatgttatacatactttaccacaatttgtaaatgaataacgaattagccaaaatatattgaaatgggtgaattgtattgcatgtgaattatatcttgacatagttgttagggacaaaaagggcattcacaatttcaaccttgctgaaaagacagaattctgcagtgctagtaagaagagttaggacacgggataagattgacatgcaattatttagtaagtgtatgcaagcttaaaatccaaaaaataataaaggaaacgcgaagccagtaattgaggacagagccactagtctcctacttttcatgttttgctattcaatacttgctacgagaaagactatttggctaacttcctagaacttgtaacattgtcagtgcccagctaccttaatattccagggagcattgctgacactgttttggcttttgcatgatgagtaattataatgctataagagaggcaagcctgagtcctgggattacccctttacctctatttaggtttatctattccattccagtaatagttactcaccrctaytttaaaaaagaaaagaggytttttgacatcagctgttgctattctatatgttatcttctttctgtaagggaaggtacccttatcwccattctggatctgagcctgaaatctggccaccttttcttcattcatgctgatagtgaacctgaagcaggaggctttttcaacactagcaagtggcaacagcaaaatggcagctctgatgaagacagagaatggaccattggcagttagttttwagaaaatgagtttctagattctcaacttctgtctatgctttttcttaaaagagatcttctatcatgctagctctcagatgttacccagtcctactcttccagctccccatttatrtccaagctcctgctactgatatacacccactatggtgcattgcttatgggaggaggaacctccagggctccaggaaagatacatttctaaatatcagtgctggccagtgaggaagtggatgactctgatgatggagtaatgcatcttttgcaagttagatgtttcccaattctttgctttcaacaaaattgaaagagagctgagaaagttgacataccaaatttcattaaaaatcaacttttgataatcagtaactatgtgggttttggcatatacttcagaaagagttcaaataattgaatgaaatcactataataaaaccccttctattccattctacctatttatgctacaaggagtccaataaaaacaaatccatacttagataaagaaaggcctttttcaaaaagacttatgtaatgggggtggcagggggaaagctattgtgaaagaatactccactggagcaaacaaggttagaaggaacagagtatgggggaaatggaatcagagagtggcacattggacaatttttctttgcartcagccaattctggaagggtcattaaggaggttgttccacattccaatgcttgtttaaactcaacagtaggccaaagttcaggggcctcaggggaaaagagaagcctaactagagtttggtcaggtcagattagcaggtattttgtccagactggtcagtgcaaacagttcatctaatcatttatgagataaaataatgggaatttggagagcctgtgttgtctttgtcttaggtaaacaagggggtcgtcatccattggtcttatctaaatcatatagggaagggtggatttttgcagtaagccattttcaggaccgcaraagagtggagggatttttaaactattgctattttccaggagtatgatgctcaggtaaagttcaacattgccaacctttttgtttgtttgtttgtttgtttgtttttgagatggagtttcgctctgtcgcccaggctggagtgcaatggtgcratctcagctcacagcaacctccgcctcccaggttcaagtgattctcctgcctcaggctcccgagcagataggattacaggtgtctgccaccacgcccagctaattttctgtatttttagtagagatggagtttcactatgttggccaggctggtctcgaactcctgacctcaggtgattcacctgcctcggcctcccaaagtgctaggattacaggcgtgagccaccacgcctggtcccattgccaaaggtttacatggatttgatgctgaaccctgtgcattttattaaaaagtcatgagcatccatacgacatccatttcactaaaataagtatttccagtaatgttttacttccatattggagcacccactaactcagctattagtgttaagttcaggaatgacagaaggactcattagatacaatttgtttccataatatagatgcttattccatgcaaactgcttcattatgmagaatccacaattacatttttggcatcctgatcattttatctaaggatccaagatcacaaggatttcttaagcagttgctgttatttttcaacaaaattactcaacttctttatactataatgcttgtcctctgtaacgccttgcatgcccctattgggatctgggctagtttgattaaggagggatctcagtgggatggcagtgtgatttaactatgttgtccctccctttccctcacaggtactagggaagctatgaagatcagattttgctaggcttagagctcttggctttcctttcccttctctttgtcaatgctttcatttccaaaaaagccataagaaacgaacatgggatagtatttctagcttttccctgcactgcttgcttctcttttttcaacccatttaatcagttcttagtgaattagatcaatgtttttttaaatttcactgataagagcaattcttggatggagtcatatcaaacaacatgatggttaagcaatctttcaggcatcaaaattatttgttccctattcatcttcttacaacataagggttttttgcctctacggggtcagaggtcttcgtatcaattgccactttatttttaatttaatttttctttttcatcactcccaaagcaccggaatcaatcgccacttttgatacaaacctggattgatggaaagactaacaaaacaacgcagtttcttttttcttttctgagatggagtttcactcttgttgcccaggctggagcgcaatggtacaaactcggctcactgcaacctccacctcccgggttcaagcaattttcctgcctcagtctcccaagtagctaggattacaggygcccgccaccatgcctggcttgtatttttagtagagacagggttttgccatgttgcccaggctggtctcgatctcctgacctcaggtgatccaccagcctcaacctcccaaagtgctgggattacaggcatgagccactgcgcccagatcaaaacgacacagtttcaataccagtttacttattttattcaaaggatgcaggacaggtagttcagcatccaagcaagcactgctttgagcaaaaggccttgcaatatcccaggcacagyttccaagcttatcatttcatgggtcatgctcagttacaagggatgaaggtaaagcaagatggaccaccttggcactgsgaagctcttctactatctgctctttgactttttataacttattagtcatatcattcctcagggtgtgtataacttaataaataactttttttttttttgagacagagtctcactctgttgcccaggatggagtgcaatggcccgatctyggctcactgcaagctccacctcccgagttcaagcaattctcctgcctcagcctcctgagtagctgggattacaagttcatgccaccatgcccagctaatttttgtatttctagtagagacggggtttcaccatgttggccaggatggtctcaaactcatgacctcatgatctgcctgcctcggcctcccaagttgctgggattacaggcgtgagccatcacgcccggccataaataacattctttgggagcagctgtagcacctcaatgaaaggttatacaacaaatagccccaacaaccagatacacttcaggtggaaaaagcatggtccacacaacattctacacttaccrtaacttagtacattttgagaactaattttgcaagaaagtaaattcagggtcagcttcccaggtgtccctggacctggaccaagagtttcaattctctgagaattgtttctcttacaatgcttaacaattattttttaaaagtgtatttactttttgtgattgtttgtttattactaataactgtagtgatcatttaatccagaagaaacattgaccacttagaactttaagatcggctgggtgcggtggctcacgcctgtaatcccagcactttgggaggccgaggcgggcggatcacgaggtcaggagatcgagaccatcctggcgaacactgtgaaaccccgtctctactaaaaatacaaaaagttagctgggcatggtggcgggtgcctgtagtcccagctacttgggaggctgaggcaggagaatggcgtgaacccaggaagcggagcttgcagtgagtggagatcacaccactgcactccagcctgggcaagagagcgagactctgcctcaaaaaaaaaaaaaaaaagaactttaagatgacaggaaataaaaacaatttaaaataatttcaattcttagacacatttttgctcagagaaatatgataagatgattaataaaagacttttgaacacatattaaaatcaaattttgtgaggaaaaggaatgaaaaatttttcaaagataaaataaattatataaaatgtctgtctattgaagaagagtgttattttctctcttgtatgatgaatgatggaatataccaaaaccctatgctaattagatttggtagatacactttaagaagtaatataacgtctgtttttatttatttrtttatttagacagagtcttaccctggtgcccaggctggagtgcaatggcacaatctcggctcactgcaacctccgccttctgggttcaagcgattctcctgcctcagcctcccgaatagctgggactacaggcacacgccaccacgcctggctaattttttgtatttttagtagarcyggggtttcaccatattggccaggctggtcttcaactcctgacctcatgatccagtcacctcagcttcccaaagtgctgggattataggcgtgagccaccacacccggccagaaaaagtaatataacttctatttttaaaagtcaatatttacattatgcctcaaattatgttctttgaaacaagttagaagtaggtgaggaagaacatatctttttgaaattattttaggtgtactgagaaaaagttaagtttaacagagagaagggatgactaaattatgttaaactatgtgactatccgagggttcttttagtactctcttaatctagccatagcccttagatctatcctcacmgtaagaaacacatgtttttctccaattactttaggggckactactgtatgtcaaagatcatgtcacttgattttatttatcttttcrttgcaacactattcacaacttgtcacttttkaaaaaacacaaggtcagttaggtagatcacatgactattcttagtttttcatactctgtatccaaattttacctttatactctttgccrtgtgactttgcagttctccccactagggaagggatgtatttcctgtgagttactttgactaatgaaatatgagttgaggccgggcatggtggctcacgcctataatcccaacactttgggaggccaaggcgggtggatcacctgaagtcaggagtttgtgaccagcctggccaacaatggtgtgaccccatctctactaaaaatacaaaaaattagccgggcatggtggcggacgcctgtaatcccagctacttgggcagctgagacaggagaatcacttgaacctgggaggcaaaggttgcagtgagccgagatcacaccactgcactccagcctgggcaataaagagcaaaactccgtctcaaaaaacaaacaaacaaacaaacaaacaaataataaaaaaaagaaaagaactatgagttgaaggaayggtgtgacagttcttgcttcaagagacaataatttccgatatgttcctgcgattatttatttatgtatgtatttatttattcttttttgagatggagtctcgctctgtcacccaggctgaagtgcagtggcaccatctcagctcactgcaacctccaactcctgggttcaagcgattctcctgcctcagcctcctgagtagctgggattaacaggtgcgtgccaccacgcagggctaatttttgtatttttagtagagatggggtttcaccatgttggtcaggctggtctcaaactcctgacctcgtgatccgcccgccttggcctcccaaaatgctgtgattacagccatgagccactgcacacagttgttcctgtgatttttttaacgaagatttaggagtttttcctttgagtgagaaaactggcgatatttgaataatggctgaagaatagtattgtatgaatgttaatttcccggttatgatcgctgtactgtgattgtgtaagatgttaacaccagggaatgctgcgtaaaagatatacaggaactctgtactattttggaaacactgtagtaagtctaaaattatttcaagacaaaaagtttacaggacatgccccagttagctgctggtccaaagaactgaggaaacatgttgagcagtcctgaacccaagtagaagcctrgagccacactcaggcaccctatagcctaaagcaaggttgctccagcccatgcaaagatccatgaacttgttgttgtaagtctgagacataggaggtgtgttatgaagcattattgtggtaataactgactgttttagtccattctcacactgctgtaaagaactgcctgagacttggtagtttaaaggaaaggggtttaattgaytcacagttccgcagggctggggaaacctcaggaaacttataatcatggtggaaggggaagcaaaaccttcgttcttcacatggcagcagcgaggagaagtgctgagcaaaagcggggaaagccccttataaaatcatcagatctcatgagaacgcactattatgggaacagcacgggggaaaccgccctcatgattcaattacctcccacagggtccctcccatgacacgtggggattatgggaactacaatacaagatgaaatttgggtggggacacagccaaaccatatcactgatgaatataatggagttgaaatatcttgtctttaatttgtatgtgcacatatgtgcatgtatgtctgtatgcccatgtattttaatccagcacctctttattcatgcattagagtgacagtcagaggtcctcaataattgatgagttttcctttgagaatgaaataagagagatttgataacttgattaattcatagacaccaccttaactaagtgatcagagttaatatcaccagtaatgagatatatcaacataatataatcccttacataatgcaccaagaagggggcaacatacctgctgtggaattcttgccaaaaatgcataacctcaatctaattgtaagaaaatatcagacaaactaaattcagctactctctgtaaaataactaatcagcagtcctcaaaagtattaaggtcatgaaagacaaagaaagactgaggaactgtcacagattggaatagactaagaagacatgatggcttagagaaatgtaagatcctggattagaccttggaccaatgaaagaacattagtgggaaaactggcaatatttgaataacggctgaagaacagtatttagcaatgttaatttcccggttttgatcattgtactaggttgcgtaagtgttaacactagaggaagctgggtaaaagatactacaggaacgctactattttggaaactttgaggtaagtctgaaattatttcaaaatgaaaagttttaaaaaacatcaggaatgaggccatttatctttagagtaatacattttaaggaatctttagggtttccatttaggataatatttgccagacctcatgaaattaaatcaaaatctctgaggtgggagtgaggcatcggtattatttttaagccctttaggcgatcccaattgcagccaagtttaataacaagtagtatagacaataaccatcaaatgaacaccagtgtacccaccacctagtttaagaaatacccagttttgtttgtttgctgrgatgtcaaggcaagaaatatctagttttaagaaatacgctgtagactcttccctgatcctgcctgcaaatttctccaaccatagttttcctcattctgtaatcaagtttaatttaatttaatcatagtttaatcaaatacacatgtatccttaaaacatatagttttaaacatatacttttatttttacacgtttaacttaatatgaatgaaaccaacattataaatatatttttggcagctagctcttttcttactcaacattatgtcaatgaaatgtatagattttaattcatgtagatgtagtttattttcattgctttcagtattttattattttgttatatcaggatttgtttgtccattctaattgagaacataagggctgtttctagttttttgttatgatacataatatagctttgaacattcttgtttgcctcattgcgcccacatgtaagagtttctcctgagcacatgcccagtaaatggaatttctgagtcatagggcacatccatttcaggtgttctagataatgccaaattggtttccaaaatcaatacaccaatttggagtcctatcagccgtgtgtaaggttgcttattgctccacatccttgccatcttttgattgtgtcaaacttaactcctttttttttttttttttgcaatatggtgggtataaaattatctcattatggtttgaatttgcctttccctgttaagtagtgagactgtgcttctgttcgtgtttctgtgggttgtatactcatgaaatgtatgtatgtgtttttcttccatttttctcacgggttgtttggtatttctttwtttttttcttttttttttttgagacagaatctcgatgcattgcccaggctggagtgcaggggtgatctcggctcactgcaacctccacctcctgggctccagtgattctcgtgccttagactcctgagtagctgggattacaggcacataccaccacacctggctaatttttgtatttttttagtagagacagggtttcaccatcttggccaggctggtctcccactcctgacctcaaatgatctgcccacctcagcctcccaaagtgctgggattacaggtgtgagccactgtgcccggctgagttgtttggtatttcttacttatttgtagaagttagttatgtttttctcagttataattctttgtcaattatgtgccaaatatcttctcccagtttgtagcttatattttcattttcattgtggtatcttttgaaaaccagaagttcttaattttaatataatacaatttatcaatctttccctttatatgattttcttctttttcctgttttaaatgatggactattagaacgtggaactatattattttaaatattatgataaatacatagaatacataatacaaaaaagttaaacaactggtatatatattggataagaaaagataaaatgatatctttcagctgattataagatttatgcrgccgggcactgtggttcatgcctgtaatctcagcactttgggaggccgaggcggacggatcatgaggtcaggagttcgagaccatcctggctaacacggtgaaacccccatctctactaaaaatacaaaaaattagctgggcttggtggtgggcacctgtagtaccagcaactcgggaggctgaggcaggagaatggcatgaacctgggaggtggagcttgcagtgagccgagatcgtgccactgcactccagtgtgggtgacagagtgagactccgtctcaaaaaaaaaaaaaaaaaaaaaaaaaaagatttatgcctgtatatcccaaggactccggtttgaagaaaaaaaaaaactacttgaatcaataaaagtagtgatatggtagttgtattcaagataaaaatacaggccagatgcagtagctcatgcctataatcccaacacttttagaggccaaggtgggagaggattgcttgagtgcagaagttcaagacctgcctgggaaccatgccgagacctggtctctacaaaaaataaaaaattagctgggtgtgtggtgatgcatgcccctagtcccagctactcaggrggctgaggtgagaggatcccttgagcccagaaggtcaaggatgcagtgagccatgatcatgccactctaccccagcctgggcaagagagtgagatcctgtctaaaaaaatttaaaaaaagataaatatgcaaaaggtataaaaaccagtatgttttttcaattcttgaagtagtggcacatgcctgtaatcccagctacttgggaggctgaggcaggagaattacttgaaccctggaggcagaggttgcagtgagccgagatcgcgccactgcactccaggctgggtgacagggcaagactctgtcttaaaaaaaaaaaaaaaaaaaaaaaattggccgggcgcagtggctcatgcctgtaatcccagcactttgggaggctgaggcaggcggaacacgaggtcaggagatcgagaccatcctggctaacatggtgaagccccgtctctactaaaaatacaaaaaaatacaaaaaattacaaaaaattagccgggcgtggtgacgggcacctgtagacccagctgctcgggaggctgaggcaggagaatggcgtgaacccaggaggcagagcttgcagtgagccgagatcacgccactgcactccagcgtgggcgacagagcgagactccgtctcaaaaacaaaaaatcaaacctgcaataaacttatgcatatatatgtttayattgttggaagtttatcttcagggtaaatttctagaaatgagattgctgggtcaaaatataagtgcatatgtcgtttattcagatattaccaaatttctctccagaagcgttgaaccmattttcattcccaccagtaatgaatgagactgtgtatttcccttacagtctctccaacagaatatactgtcagtctgtatttttaaatttttgtctatctaaacttttccaggtaaaaatggtatctcagtgttgttttaatctgcatttttctaattatgaatgagtctgacattttttcatatatttgagagacatttttctatctttttttgtttgttgtctgttcacatcttttcccatttttctgttgagtttttggtcctttgtcctcaaattttaagcattttttatattttaaggattttactccttgtctatggtatatgtgtgaatattttctcctatttttgtcagttatcctttgtccttctttatggtacttttgtcacgcaaatttaagcatttacatatcatcacatttatcaatcttttattacgtctgaattttgagccccagttcaaaagccattccctacactgaagttaaagaggaatctacccgtgtgtttttctaatatgttggtgcaaaagtgattgaggttttgccattacttttatttatttatgtgtttgtttgtttgtttatttttgagatagagtctcgctctgttgcccaggctagagtgcagtggcacgactggctcactgcaacctccacctcctaggttcaagtgattctcttgcctcagcctcccgagtagctgggattacaggtgcgtgccaccatgctcagctaatttttttttttttttttgtatttttagtagagatggggtttcaccatgttggctaggctagtcttgaactcctgacctcaggtgatccgaccacttcggtctcccagagtgctgggattacaggcatgagccactgtgcccagccctgctgttacttttaatggtgcttgaatggtttccttttttacatatagatccctcatctattagaagttgattcttacatatggtgtgaagtattcatctatatatattttccaagtgcctacccatttgttctagcattttttcaaagtctttctttacttcagtgatttgacatgccatctttgccagatacctaattgtatcttgataaataaaagttacttttaatggctaagtactttaaaatattatcttaagttacttttagaatttataaayatttctccctctttttaacccctttaaggtaaagagtcccaaagcagctttagggagggaaaaaggtcacagtgggaccttggcctggccttaactgtcaagacactaagctgatgagtggcagctgtaaagagttgtcctggggactgtgccaggatactttttatattatttttatctctatgaaagcaatacatgtgcatagttttatatgtcaaaaagtgactgggcatggtggcatgtgcctgtaatcccagctactcgggaggctgaggtgggaggattgcttgagcccaggaggttgagaacrgcctcagcaacatagcaagaccctcatttcaaaaaaaaaaaaaaaaaaaagaaataaaataaaataaatgtaaaaatgaaaaaacaaaaagtgaagtgtgaacaataagaagtgtaaatcctggccgggcatggtggctcacacctgtaatcccagcactttgggaggccgaggtaggtggatcacgaggtcaggagttcaagatcagcttggccaagatggtgaaaccccgcctcttctaaaaatacaaaaaattagccgggtggggtggtgggcgcctgtaatcccagctactcgggaggctgaggcaaaggattgcttgaactcgggaggcagaggttgcagtgagctgagatcgcgccactgcactccagcctgtgcgacagagcaagactctgcctcaaaaaaaaaaaaaagaaatgtaagtccttggctgtacccctcccctaaccttgatttccaactagagtttaagccttaagaggggagattagaactaataaataattttagcaaggctgcaagatatgagatcaatacacaaaaatcaatcgtgtttctacacacttgcaatgaacagttcaaaaataaaattaataaaagtttcatctacaatagtatcaataagaatacattatttaggaataactttaacaaaagaaatgcaaaaattatactccccaaactgcaaaccattcttgaaagaaactaaaaaacatccaaataaatggaaaaacattctatgttcatggattgggagataatattgttaagatagcaatactyggccaggcacagtggtgcatgtctgtaatcccagcactttgagaggctgagctaggatgatcacttgagcccaggagttcaagaccagccgaggcaacataggaagaccccatctytacaaaaaatttaagaattagcccagccaggcacaggggctcatgcctgtaatcccagcactttaggaggccgaggtgagtggatcacctgaggtcaggagttcgagaccagcttggccaacatggtgaaaccccatctctactaaaaatacaaaaattagcctggcatggtggcatatgcatgtagtctcagctactcaggaggctaaggcacaagaatcacttgaacccaggaggcagaggttgtagtgagctgagatcacgccactgcactccagcctgggcaagagagcaacactccctctcaaaaaacataaattaaataaatttaaaaaaaattagttgagtgtggtggtgcacgcctatggtctcagctactcaagaggctgaggttggaggatcgcttcagtgcaggaagtcaaggctgccaaggctggtgtgagctgtgatcacaccactgcattccagcctgggtgacagactgagatcctgtctcaaaaacaaaacaaacaaaagcaatactcctcaaattgatctatagatttacagatttgaagatttgatcagaattccagctagttatagaaattgacaaaatgatctaaaattcatatggaattgcaagggacctagaatactcaaaacaatcaagaagaacaaagttggaggactcgcactttgcaatgtaaaaacttaataagggctggaagcagtggcttataccagtaatcccagcactttaggagtccgagtgggcagatcgcctgaggtcaggagtttgagaccagcctggctaacatggtgaaaccccatctctactaaaaatacaaaaattagctgggcattgtcgtgggcacctgtaatcccagctactcrgcagtagaattgcttgaacccgggaggcagaggttgcagtgagctgagatcatgccactgcactccagcctgggtgacacagcgagactccgtctcaaaaaaacaaaaacaaaaaacttattgaaaagctgtagtactcaaacctgtgtggctgtagtctaagaattgtcatgtagatcaattgaatggaattgagggtccagaagtaaacccacatgtttatggtcaacatttttaagaagagtgccagratcttcaaatgaggaaagatctcctgattggctacaagtagacctgcccttatttgggtataaacccatggaaagtccctagttagaagttaattgacagtttctggttggttaagtctctagttttgttttactttttacattgggcctcagtttgcttacataggaacccaaaaagctgagactatctcagcctaatggcctcccagttaaaatgttttgttttgttttgttttgttttgttttgagaaagagtctccctctgtcacccaggctggagtgcagtggcgcaatctcggttcactgcaacctccacctcccgagttcaagcaattctcctgcctcagcctcctgagtagctgggattacaggtgcatgccaccatgtgtggytaatttttgtatttttagtagagatgggktttcgccttgttggccaggctggtctcaaactcctgatttcaggtgatccgcccaccttggcctctcaaagtgctgagattacaggcatgagccaccacgctccrcccccagttaaaatgtttttaacgggcagtattaatatcattccatttcacagctgaagaaactgccttaggctatgtaacttaagatcaaacagctgtaaagggtgaatctgggatgcaaacccagccactgactacagagctctgctcatcttttagactatatggcactcaactcacgtcaacttttaaatgtggtttctttcttttagagcaaattttgcaatgaatacattcttgtaaaagcacttaactttacataagtgtttaaaggaaaacacatagatatatccccaaccttcttttttyttttttytttttttttgtggcagggtcttactttgtcacccaggctagagtgcagtggtgtgatcatggctcactgtagtcttgacctccgggtgcaagtgatcctcctgccttagcctcccgagtagctgggaggtgcatgccaccatgcgtggctaatattttttgtaaagaaggggttttgccatgttgcccaggctggtctcgaactcatgaactaaaagcaatccactcacctcagactcctaatagtgctaggattgcctrcatgagccactgctcccrgccgcaccccccacctttgtacagggcaaagactttgttatgtattcttccagacttttacattttagggagaaatttgtgcttccatcgaaaactgcattttataaattgcatccttcctggttatctgattctatgagagttactttataactctataggtttgttagcaatgcaaagtaattaatactatattgataacaagatacaagaattaatgtaaaataattcttatctatatatatgacaatggtctgttagggggaggccaacccacctgccccaccccaagccagtttgcacaatcatttctacatttstttactccacataaatttcttcttctttgacgcctttgaacaggttataacatctgcctacttttctcatttaattaatacgttaagtaaaatctttagcatttgagaagatacaactataaatatagctatgattcagtaattatgggtttcttacatcactgcccattagtcccctccagccaccagaccagactgattatttatggttttgcttgctttgcttttgttttctaggtggckatctcttaggaaccccagtagtttggacacacacacacacacacacacacacacacacaggcaaggtcacagtcagatccctggcacgttaatttggccatttgcccaggagcagctggtagcaatccttgtgttccagcacttaaatttctcctctcaggttaggatctctgagaatataggaaagaaaaaaaaaaaggagtttctcctagtctctcactaacaatcaacgtagaagactcctgtgacctctgatcaccaaaatgtgtaggggtttcttctcaccagcaactaatcaatcaatcctgaccagttgggtgtcttctaaatcagctcagttctgacactatccacctggagatagcatcagattccacaggttgaggactcaattcccgagactgccctgttttccattcagatgccarttgcaagctccaggttgttttacctgtgcttctgactgaccaagctatacatcgggtttcccaaaaacccctccttgggtttgatkgatttgctacagcagctcacagaactcagaaaaacacttaactaacctttactggtttattataaaggatattacgaagaataatgatgaacaccagatgaagagatgcatagggcatggggtgagggaaggggcatggagcttccaggccctctctgaatacaccaccctccaagaatctccatgtgttcagtcatccgaaaaacctctgaacactgatttttggggtttttatggagtctttgttacataagcatgattgaytaaaccattggctactggtgatcaacttaaccttcagcccctgtcccctcccaggaggttgaggagtagggctaaaagttcgaaccagcaaatcctaccttagtctttcaggtgaccagcccccatcctgaagcctagaggctgccagccgtaagtcaatttattagcatacaaaaagacatttctcactttgcagatttcacagattgtaggagttcttatgccaggaaacaggacaaaggccaaatatatatttcataatatcacagtctctaatttcattgttcagcttctccttcccataagactgtcaagcctctccagaacacagactgtgcagtattgaccattccttctactgtcccatttcttagccctgtcttagatactcctatctctgggagaattttgcttgcataccagtatgtctgttgaagagagctcttaatgctaggtcttttattttatttattatttttttttgagagggagtcttgatctgtcgcccaggctggagtccagtggcgcaatgtcagctcacttcaagytccgcctcccgggttcttgccattctcctgcctcagcctcctgagtagctgggactacaggtgcccgccaccacacctggctaattttttgtatttttagtagagacggggtttcaccgtgttagccaggatggtctcgatctcctgacctcgtgatccgcccgcctcggcctcccaaagtgctgggattacaggtgtgagccactgcgcctggcctattttatttttatttatttatttttttgagacggagtctcgctctgttgcccaggctggagggcagtggcgygatctcggctcactgcaagctctgccttctgggttcacgccattctcttgcctcagcctcccaagtaactgggactacaggcacccaccaccacaccccgctaatttttttgtgtgtttttagtagagacggggtttcactgtgttggccaggaaggtctcgatctcctgacctcgtgatctgcccgcctccgcctcccaaagtgctgggattacaggcgtragccaccgcgcytggccattttttttttttttttttttgagacaaagtctcattgtgttgcccaggctggagtgcagtggtgygatctcggctcactgcaacctcctcctcccgggatcaagtggttctgcctcagcctcccgagtaactggaattataggcatgcactaccacacccagataacttttgtatttttagtagagacagggtttcaccatgttggccaggctggtctcaaacttctgacctcaagtratcctcccgcctcggcctcccaaagtgctgggattacaggtgtgagccaccaggcccgaccaatgctaggtctttgcagtgggtctcatatcattccacgtacactgaggcrcacttgttgccagagaccaaaaactttactgagcaccctttcacccccagcgcccmcttggctgggtctatttccaattcttttagtctctggggctgatgaaatgaagatgggagggtagggcaagagaaacaagaagagctagccaagaagatagaaaataaygattttcagctcactgccacctccacttcccgggttcccgcgatcctcccaccacagtgaagtggtgtcatttgcctgggaaaatacccaaggttcattgtctcataccaaggaaatcgaagacacggacacacaagagatgagtaagagcagaggcttaataggcaaaagaaagagaaaagagaatagctccctctcctgcagagagaggggtgcccgagtrggtcttccagttccatggtgaggtgcacgggttttatagactggcttgaggaggcagtgtctgatttacatagggcccaaagattggttagaccaggtgtgacgtttacatagctcacgaagaagctggccaccccaccttaatcttttattatgcaaatgggttttctacctggccagagccatgttgcctgttccttactggacatgtggttgacaaagaaaagggaagatggagctgccaygttgaacatgcctagcccccaggtaaccttttcctattgtcacagctgccggcattcacccatgcaaggttccagcttgcttatctatgtctgcagctcaattttacaggctgactttttcaaaaagaaatgacttggggactgcttttcattaaaaggaaaaccttactgaggactttcttaccctyactatctgcctaaatcatttctttttaactcctatatcaatagcctcccaagtagctgggactatacgtgtgcgccacgacactcagctaatayttgtattttttgtagagacagggcttcaccatgttgcacaggctggtcttggaactcctgagctcaaagtgatctgcctgccttggcctttgaaagtggtgggattacaggcatgagacaccatgcctggccttcaaaaagttaatctaaaaatatatawacatatatcccagaaggagaagcagaagggtcagataggtgagaaccagggctttgaatatcagaaaaaccaggaagagataatatgtcaagtatggagtgatcaatactctcaaatgccgtaagaggatttgtgagcaattgagaaagccatgggatttgttcattagaatgccactgtgaggctcaactgatgaatctcagtagggtggtgaatgtaaaggctagactatgggaggttatggggctgggaggttgagagaaggaaaaycatattttatactgttcctgagacatttaatgaaggaaaaaaaggaaacaaaaaagcaacttaaaggttaagtcccacaaatgaattcttcaagtgaactgaagagtagcaaaacatgccactccaaacatgccactttggcatattgattattttgagataaagacagtgaaaggaagggaaatgggatacttccctgattcccyttgcaggacrtgcaacagaagtgtagctcacctgttcagttgcctcactgcttaatccccttgtgagacagagagcatgcagacaggcaggtgcagaggctggggtgagcgctctggggtctggcccggcygtagtgtctaggagtggatgcctgcagccccagcgttacaaagctttcagcttggccgcccgaagacagcttgaatgttaaccagcttaatggamcytttgccttttcacaagggcagagggccaacatgatagcttgctgtatcccgagctcttgttcagcgtcctggaaaaatcaggtcacacacggactcaaaggatgaatgcgaggttttattgagtggtggaggtggctttcagagggatggatggagagccagayggtgggtggatggaatgggaaggtgatcttcccctggagtcaggccgcccagcggctggactcctttcctaccgcccccagctgaactcctcttggcatccagacgtctctcctcttctctctttccctgctgtgctgttccaccgtccatctgctggtmtcctcctctactcacctgctgctctgctgtggagcttggggtttgcggtttayrtgggggcaggatagagrgtgtggagggacaaaaggcaacctctttgtcttgaaaacaggaatgcctgtcctcatttagggccgcaggtcttcaggcttgaaggtgaggtctttgccagggatccaccctcttctaaccagtattttccctgtcccctgtccgtatcagaagcagatgcagatacaagaaaacttctctgcctgccctccatatttgcctaaaagcaggacataatttttgtttgtttgtttgttttttgacacagggtctcgcactgtcaccaggctggagtgcagtggtgtaaacatggctccctgcagcctcaacctcctgagctcaagcaatcctcccacctctgcctcccaaagtgctaggattacaggcatgagccatcacgccagccaggacacaaatttttttttttgagacagagtctcgctctgtcgcccaggctggaatgcaggggcgcaatctcggctcactgcaagctccacctcccaggttcacgccattctcctgcctcagcctcccacgtagctgagactacaggcgcccgccaccatgtccagctaattttgttttttgtatttttagtagagagggagtttcactgtgttaaccaggatggtctcgatctcccgacctcgtgatccacccgcctcggcctcccaaagtgctgggattacaggcgtgagccaccacgcctggttcaccaggacaaaaatttttaaaggtgtctgcccttccctttctaccaggaaggaccaaagttaatcactggagacaactgtagattcttatcagcccagagatgacaccagaggaatctacatttcaaacttcattaactagctcttaccatctattagttcccccatttaaacatatttactttcccacaatttatcaccctagaaacttaaagtcgttttcctttgtattatcatttctctacaaatgttctttcttatgaagctagaaaaaactgaggcatggtttaaacgtcaaataatttatctgagccaaatgtgagtgactgcagtctgaaaacacttccaggttaccttgagaagtgctccagaaatcaaaaaagagactcgggccttaaaagaaaaaaaggatgaatcaggaaaggggcgactagaaaagttgtttttcgctaggtctggggctttggggaggtgggtttcccatttgcaaaatggaactttaaaagtccacggcacctaacatttccaagctcctctaaatcttccaggaagcacaggagatgcagggcagatgggagcattctcatcctgcagataaacaggcctggggtcagctgggaggttggaaaggcaggcactagaataccaggtactgggtgagtgaaagcacagtgtgacctggcaagggaaggggaggcgagagcaaagcagttgctgtctctccarwttctccttcactaaccacctcagcccagggcctggaaagaaaaagaacttaaggacttccacaggctgagactggatgctgraggtggacagtggctcacacaccttcttgaagtcaagtggctcctcccctgcccaccagatgccaagasggtctgttggacccagacctgtggtgacagctacaagagaaggaggagacaccaaagttgagtttgctttataagtgacattgcaggctgggctgcagtgggggggcaggatgaagattcaggctgtacttttcaagggaccaagggcttgggatccacataggcctcccacaccgtcagatgtcagctccatcaatactgaaagacaatrggagatgaggtagggagggggtgagaacgtggggagagggaagggaggtggtgggaaagagaggaaggaagaggtgaggaaaggcaaggaggaaagggaagggaaaaaaaagttgtttttcaactattatgatcagtgtgatcgtatctaaagcagtcttggagtcaggagacaggctgtaattgtttaaaaggtggcctgttcctggggacttcccagctcagcaggaagcagtcacagatgttttggcagttgtttagccaggaagttctctgcttaagacatgcgtggggtggctgggcgccgtgactcatgcctgtaatcctggcactttgggaggcagaggtagggggattgcttgagcccaggagttctaaaccagcctgggcaacgtagtaggaccttgtctctataaataaataattaatttaawtttttttttaaaaagacaggcctgaggtccaaaccgaaatggcctcccgactccattttatgtgctttgactaacccgtcactgtttcccttcatcattttgttaagwtgctggacaagccccagttctagccaccctttttagttactcatcactgaatgctcccatgtgtatacaggcagcacatgttaaaaaactttttcggccaggcgcggtggctcacgcctgtaatccagcactttgggaggccaaggcgtgcggatcacgaggtcaggagatcgagaccatcctggctaacaaggtgaaaccccgtctctactaaaaatacgaaaaaaattagctgggcgtggtggcsrgcgcctgtagtcccagctacttgggaggctgaggcaggagaatggtgtgaacccagaaggcagagcttgcagtgagctgagatggggccactgcactgcactccagcctgggtgacagagcaagactccgtctcaaaaataaataaataaataaataaaaataaactttttcttggccgggcacggtggctcacgcctgtaatgccaacactttgggaggccgaggcgggcggatcacctgaggttgggagttcgagaccagcctgaccaacatggagaaaccccatctctactaaaaatacaaaattagctggtcatggtgacgcatgcctgtagtcccagctactcgggaggctgaggcaggagaatcacttgaacctgagaggcggaggttgcggtgagctgagatggcaccattgcactccagcctggacaacaagagcgaaactccgtctcaaaaaataataataatacaaataaaaaaataaaaaataaataaaataaaataaaracgtttttatcttgttaatctgtcttttgtcaatctaatttacagggcccagcctgtaaatctaaratgagtagaaggaaaaagaatttttcccctcctgggcagaacactcttgggcacgtgagccttggcttcttaaccacatatctgagcagccagtgtggcagtggtgagtggcagtggagagactccaggaagcagccatttccctatcctgggtgcttcctgtttctgtctaatgctacacatagtccatggtttcagtatgttgtatgtgtttgattgtcaatccctrtaattacatcctacctaaaatatgcatttttgttcccrgaaccaagccgggtccggctgcattttcttgaggcccaataacgagaagcagacagactaggaaagaagggaatttattgctgtaaccagatacaggcagaaggctggagataattccaccaggccaactyaaagtgtyaacaattgtcttagtgtttatataggttgggrttatgcgcctgtgtgcagtgtagcattygcctaagtctactggtaactaattttgtttcaactagaaggtcagaggcaaaaatgctttctaagtcggattaagctgtgagcggcccagtacctacaaggyctgtctrctgtggtaccagagtgattatttctatcttatctgcttyacagcttggtctggagggctgccttagactctccaatgaatctattcgaacagctgcctctgttaccttgactgtctcagatttcgttgacccgagacgggtcctggcactaggaatgaaagactgtctctattattttggtttgctccaggttagggagaagcccacrcaaggctcctactgaccatatgtttcatttctagctttgctgtctgggcaccaatttccctaggtttaactatttgctcaatgttaaggcagctctggggaaattcgtctgtgtaactggggtgctatgcaggcctgtctgtttgactgtcatgcaggtctgtctgtgtgatcatcagggagaatyggccggccacattttcaatctttctcctcttctggaraaaataaccactcagtctttagcgtcagctcacccttcagggtttgacacctggagcagcagtcaaagaagctgaaaacasgaccttcctttctaggtgttaactttagccactgtggtagatggtccagaaagatgaccactgctaattcctttcctccctgaatgtgcatactgttgcagccatcagaggcggagtcggtttccttcccttgaattccgtctggttttgcgacttcccttgactaataaacagaatgaggtggaagttaaagggaatcayaacccaccctatggtacaatgattcttttaagacattcaagttatagatgcagaaagaagcctcttctgagcttcccttatctgactataggcagggccttkggagaatgaagctgccataaatcccctctctgggggagcttccagccaggaaggagcctgactgttagcacctgggtgagaaattgcataaacaaacattatcataaactgtaatacctgccattggtttccctaaaagcccatttktacttcccacagaagctctagctttcccgctccttctgcctattaaattgttgttgtaatatacccttacccctagctgttcagcaagctactgctttctaatgctgtcacatgtatgaatataaagcatgttytttttccctctagttaaactgtctaatgtcargaaatttgcaggcccacttcctccccccaccaccacttgaacctaatttagtgatggaaaggttttattcccartatagttgtgttttatgttcctgttctaggcttaaattttcaggggcctggaagcttccatttttgtttcaggaagctagatgctatgctttgaagaagctcagccaagacaactggaagagaagagactacatggagagagaaaggccaygtggaggaccactggggctccacgcattgagtgaagcctttttggacttttgagccagccaactaataagaagtaaaaccaacactgtggagtggcaaacaaaagaaaatgcattttaatctgggtctcaggaattgcaattgggagacacagatccagcaaataggaaaatcatgttccgtcttggtgagattaggcagaggcttagaaggactactgtgagtttacacatctggaaggttttagcatagttcataatggatgatggctggttaacaatttagtacgtctttgatgatcaatctagttcagcatagctgtctcttgtcrgtaaaaaaaaaaaaaaaaaaaagccaatctctgcaaaatatttaaagagctttattctgagcccatatgagtgaccatggcccagggaacagtctaaaagaggtcctgagaaagtgtgcctgaggtggttgaattacagcttggttttatacattgtagggagacagaagttataggcaaagacaaatcaatacatctaaggtatacattggtttggccaggaaaggcgggacakcttaaggaaggagcaatacaggtcataggtggattcaaagattttctgatttggaattggtcaaaagagttaagctgaagacttaaagtcaggcygggcgtggtggctcacgcctataatcccagcactttgggaggccgaggcgggcggatcacaaggtcaggagatcgagaccatcctggctaacatggtgaaacccgtctctactaaaaatacaaaaaaaaaaaattagccaggcgtggtggtggrcacctgtagtcccagctactcgggaggctgaggcaggagaatggcgtgaacccaggaggcagagcttgcagtgaaccaagattgcaccactgcactccagcctgggtgacagagcgacactccatctcaaaaaaaaaaaaaaaaaaaaaaaagmcaaagtcartagaaagaaatgcttgggttgagataagggggggtgggctgtgattcttgttatatagatgaagcctcagatagmaggcttcagagagaatagatggtaaacgtctcttttggaatttcacaggtgtcagactcttagttaatctctgctagatctgggaaaagcctagctgcattaataaagatcctctacagatgcaaaatttctttctcaaaagatggcttctcaggaccatttcaaaatatgccaaagaaatatattttgaggtaaaatattttaattttcttcaaggtctgttatctgtcatgtgatattataccagttggaatttggtatcttcttaccaaagagtctgtttttgtcagtcttatgatctctattttaatattaatgctggtctgttatacctaaactttaaaagggagagagtataatgaggtacgtccaacccttccttcccatcatggcctggaatttagtttttcagcttgctctggggtcccctcggcctagacagctstctgttcagttggttgggggcttaggatataatttttggtttacactcttcaggttgatgatcaggcaaagcataaacagttcaaatcaaatgcagctggttttacaatttggcccarttacagtcagatttcatctgagggtccaactcttcatgccttctcaactcaactgttagatacctccaacaaaaccatcaaccatctccattgtggattttcttgtcagaaccccagcccatcgtctcactgaagccatcctagtgagtgaccatggctgtcaccacatgaactaaaagaaccatcaagccaagccctgtctagtgtccagacctacagaaacaggagcagtttggagtggtttattatctagcaatagataactgaagtagctacaaagataactttagcatgatttccaggcaaagtgctctctcctcagaatttgtaagattcctccaaagarcagctgtagagctgttaagtatccaatccaaacagatgggagaaaagataaagctcttgacaagctgctgtggaaaataccaattcatgttatctctgccttcctgggaacttgcaaatgaaccagccctcaaatgcagctctggatatgacaaaccatcccagatggacccctaaagktcccsaatagctttgtatctttcaaaaccacataaatcttagaatctacagtttaggttttgtttgtttgtttgtttgtcttagacagagttttgctcttgttgcccaggctggagtgcaatgacgtgatctcggctcactgcaagctctgcctcctgggttcaagtgattctcctgcctcaacgttccaagtagctgggattacaggcacgtgccaccaggcccagctaattttttgtatttttagtagagacagggtttcaccatgttkgccaggctggtctcaaactcctgacctcaggtgatccayctgccytggcctcccaaaatgctgggattacaggtgtgagccactgctcttggcccagtttagggtttatagtgtgccaaactacgagatccctyccagttctgcttatcttaatgtaaaaggacattaaatataaataatataaattatataattaatgacaattaaaattatttttaagttaattgtttttgtttttgtttgagactgagtctcactctatcgcccaggctggagtgcagtggcacgatctcggctcactgtaacctctgcctcctgggttcaagcaattctcctgcctcagcctcccgagtagctgggattacaagcgagtgccaccatgcctggctaatttttatatttttagtagaggccgggtttcaccrtgttggccaggctggtcttgaaccyctgaccttaggtgatccacccacctcggcctcccaaagttctgggattacaggcatgcaccaccgtgcccggcctgctaattggttttttaactaaagaaataatttatggagaaycaaacataaaaaggtataagacaaaaagaaaaagtcaaatggtgtcaaagaatggtgtcccagactcccaagyaggaatccttgcagaaattttccatgtttatacaataaccaccataaacattgaacatttactaygtgtcaagtactctcctaaacactttatatgcattaattcagcagaaagcaaattttttatgttaaagttacatagcaaatattttaggctttgtagagcacttggtctccgttgcaactaatcaacactttgttgtagtaagaaagcagctatagggagtatgtaaactaacggatgcagctatgttccaataaaactttatttawaaaaacaagctatagygccaggcgcagtggctcacgccagtaatcctagcactttgggaggccaaggcaggcagatcacgaggtcaggagatcgagaccatcctggccaacatggtgaaatcccatctctactaaaaatacaaaaattaactgggcatggtggtgcgtgcctgaagtcccagctactygggaggctgagacaggaaaatcacttgaacccaggaggcggaggttacagtgagctgacattgggccactgcactccagcctggtgacagagcgagaccccatctcaaaaaaaagcaaacaagcaacagccagatttggcctatggctattagtttgctaactcctgaattatactcatgtaatagtcaaaaaaaccttatgaggattattatcataacaccattttacagataaggaaccagggatagatacaaaaacagagaactcaagtaaattgcccaacaagttatcaagtagtgaaactgagatgtaatcccaggctgtctagctccagagtgttttttagacactattttttaaagcacacatgtatgcatgtatgtctttaaaatttttatttatttattttttgagatagggtctcactctgttgccccagctggagtacagtggcatgaacacagcacactgcaacctcgacctcccagactcaagcgatcctcctctctcagcctcctaagyagctaagaccacaaacatgcaccacyatgccttgctaattttttaaattttgtagagccaggtcttgmcmtgttgcccaggctggtcttgaactcctggtgagagctgaagccagctggacttcctgggttgggtggggmcttggagaacttttctgtctagctaggggattgtaaacgcaccaatcagcgctctgtgtctagctaaaggattgtaaatgcaccaatcagcactctgtaaaaacataccaatcagtactctgtgtctagctaamggattgtaaatgcaccaatcagcactctgtaaaaatgtaccaatcagcgctctgtgtctagctaaaggattgtaaacgcaccaatcagcactcggtaaaatggaccaatcagtgctctgtaaaatggaccaatcagcaggatgtgggtggggccaaataagggaataaaagctggccacccccccagccagcagtggcaacccactcaggtcaccttccatgctgtggaagcttttttcttttgctctttacaataaatcttgctgctgctgactctttgggtctgcaccacctttaagagctgtaacrccatgaaggtyggcagcttcattcttgaagtcagcaagaccatgaactcactggaaggtagaaactctggacatatctgaaggaacaaactcctgacacaccatctttaagagctgtaacactcaccacgaaggtctgcagcttcattcttgaastcagtgagaccaagaacccaccagaaggaaccaattctggacatgctggcatcaagtcatctgctcaccttggcctcccaaagtgctgggattagagatgtgagccactgcgccyggctgtgctgttttgttttgtttgttgttgttttttaatttgagatggmgtctcgctctgtcacccaggccgtagtacagtggcgcaatctcagctccctgcaacctctgcctcctgggttgaagcgattctcctgcctcggcctcccgagtagctgggactacaggctcatgccaccatgcccagctaattttttgtatttttagtagagacagggtttcaccatgttagcccggatggtctcaaatctcctcacctccttacctcaagatctgcccacctcagcctcccaaagtgctgggattacaggcgtgagccaccacgcccggcctatgtgtatttttttttttttaactcatactgtacatgctgtttggcatcttgcttttctcacttaacaatatcttgcctatctttccacgtatataaatctacctcgttcctttaatttgctgtatagtattccattgtatgaatcaccaatcaataaatacctagattgtttctgtgcattttcccttaaaagcaatgcttcactgagtatccttgtgctgaggtatttgcctgcagacgctcacacagctaagaatgaaggaaaaattattataaataaaatggttggaccaggtgaggtggctcacacctataatccccacactttgggaagctgaaacgggaggatcacttgtggctagaagttcgaggccagcctaggcagcaaagtgagacctcatctgtacaaaaaataaaattaggccgggcgcagtggctcacgcctgcaatcccagcattttgggaggccgaggtgggcggatcatgagatcaggagatcgagaccgtcctggctaacacagtgaaaccccatctctactaaaaacaatacacaaaaattagccrggcgtggtggcgggcgcctgtagtcccagctayttgggaggctgaggcaggagaatggtgtgaacctgggagkcggagcttgcagtaagccgagatcacgccactgcactccagtctgggtgacagagcgagactccgtctcacaaaaaaaaaacaaaaaaaaaamccaaaatacaaaattagccgagtgtggtggcacaggcctgtaatcccarctactcaggaggctgaggcaggagaatcgtttgaacccagtaggtggtggttgtggtgagccaagatggckccattacactccagcctgggcaacaagaatgaaacagtgtcccccactcaaaaaaaaaaaaaaaaagatcagcaacaasataaaaccaccaagggctagagggacaaattgaggagccrgtgtgaccagaggctagaagctgggtgggaagggctgtcctgcctggtgggagctgggtcatatatgagacagatgcagccgctgctgggaagacccccagatgcagaaaggggaaagaaatatgctggctctcccattcaattattcacccttcagtctcctgccagcactttccattggctgattctaaataaaagccagttagcaaaggggcttaggaactgtagtttgcagggctcagcctctgtggracagagcagagcagaagggtagggaatgggttggaaagcaaacaggaaatgactgrtgtaaagaatattgtgttttacattttgaaatactatgcagccataaaaaagaatgagttcaatgtcctttgcagggacatggatgaagctggaaaccatcattctcagcgaactaacacaggaacggaaaactaaacaccgcatattctcactcataagtgggagttgaacaatgagaacacaagaacacagggaggggaacatcacaccctggagcctgtcagrgggtggggggcaaggggaaggagagcattaggacaaatacctaatgcatgcggggcttaaaacctagatgacgggttgttgggtgcagcaaaccaccatggcacatgtatacctatgtaacaaacctgcacgttcagcacatrtatcccagaacttaaagtataaaaaaaaaaaawgccaaattgcccaccaatgcagctacaaagatttatagttccaagtatgtctattttccagcaaattccccagcaccatggagatttatccatctaagttaaaatggttttctgctattttaatttgcatttccttaattatgaatgcagttgaacatcttctcatttgtttatatgccatatttattttgtttagtatttaatgcatgctatttaatatttatttttattttaacagtaggtttatatcttttgccaattttctttttaaaaaaacttttttcccaaattcaaacgagtgtcagtagaatgccaattttcctattaagttgttggacttattacttgtaagaaatatatgtgccaatcttaagtgttgcaaatatttttccccagaatgctctttgctttttaacattttagtcacatgttttactatgctgtttttaatttttatgtagccaaacataaatctttttcttcttctatatcctctggattaaagattttgtcttttgcttaaaaaggccttttcctcaagattatacaaatattggaatggaggaatatttttaaattttcttctgtgttttctctgctctagacaaagactarccctttgggtctctttattctcccaggttaaaagctgtttggtttgagaatattctcttgtacatcctgcattctgtcctcattaatctccaaaggaatttcttaattaacgagagaaaccctttttctctcatctgagatatacaatgtagttagcttggaaactctgacaagcctccttttctatctctgagcatctcctctgccttgtcaactcttgtacgctatcaactagtctaagtttctattccaggatgtggattgtaatgaagaaggccttgaattaaaagggacttggagacaatattgaaatatgactagaggctcagttctccaatatatgcaaaagttttcttctctgcagtagagatggtgcctacaatgatttcacaattctagccggtactatgaggttcataaaaacatggtccacaaattcaggaaccatgtgtgtttgtgtttaactgytgtattcctggcattttgcatggtacatggtatggcaatgatcctcaaaaaatatttactgatttgaagattctttaagtcagaatgatttgtatcttctccagcatatctggatcctaaggggtgatgccaacaagagtcctggagaaaagtgtttctgttataacgtggcatggttaggkcctgaagtatayatttgcttatatttgctgtatacctttgtgctktgctctcttaatgatcccccaaaagctcctttcccgccttccccaggccacaatgttgcagaaaaaaagttcaagaattgctaacttgactgtgacttgaaatgattaaaatgcatgcttasaaaccagtttcttaaaccagtttcttaattcacaaagactagataaaatcacagctgggaataggaaggagatagaagaacaagcagcttgattgcaggggaaagtgaaaggaaatagagacttaaaggaagaagaaaggagaaaaagatcttccatcatgaaggctgaatgataggggaaatttttcacacamccctataaacaaacacagaatctgaggacaatccacatcccacctttgtagacatttaaagtcaccctaccttgatgaggaggaactcagatgccttgagttgaaaatggcccaactgtctgatagaactggtatttgtggtttcttttgaataaaagaaagaaactgaaagaaaactgaccctcccagtcttaaaacttgagaaagttacatttgtcttaatctgagttccttcctcatgaagccaaccatcaggcctcccagatattatcaaggaactgaaacttaccagatcactgcatctggacaatgaggagccagacccctcacccatcrtgattgcctaagcaaccacctgcttcttgttgaccaactcctcccctttacccctccctaattcttgttttcccaaaaatggttacatttcttttctgttatacaaacccttaattttaatcagtcagggagatggatttgggactgatctagaactcatctcccatctcctcagctgcagcacccaactaaagccttcttccctggcaatacccattgtctcagtgatcaagcagcagtacctagacagaacccctggcatttcggtaacagggygaataaatggatgtgcaaggaaaacctcttcatcttaaataaagggcagatgaacactaagccttaggatggtgccaatgaacacatgttgggttgtttccactttttgactattatgaataatgctgttatgaacaytgtatacaagtagaggaaggagtctaaaggcccagggaaacaagaatgatgcatgaatctgttaygaacagcctgccctgccactctgaaagacagtcatccctggaagagcctggaggacgtcccctatacccaggcattacagatgcaacagtaaggagacttgagcattcttataaaactgtgttgcagctgttctttgccagcaggagatggtggcaaaggatgttgccatggaattgaatttcctgatctcagctggaataaaggatccaggagtggtagaggccagttgcaatccttagcttgcagtgacaaggtgtcttagtcagtttgggtttagtcagtcagaataccatagatgggtacttaaacaacgaacatttatygctcaagttctggagactggaagtcctgagattagggtgccagcatggctggtttgcrgtaaaggcttgcctcctggttcacagatggctgtcttctcacatggcaaagagagtgagagctcttctctttctcttctctaaggacactaatcctatagcaggagctccaccctcatgagctcatctatacctaattatttcccaaagaccccacttcctaataccatcccattggcggttagggtttcaacttacggattttgggggaacacaaattgcataacacaaggtgagtacaattaccagagtaacccacagggatgaagtgtgtacgatcacagggtatgaactttcgggatatgtaacatcgtgtaatcagtcataagactgtaggaattaaatacaagggcagcccaaagtacttcttcacatatccaggcaatgattctaggtctagtgggcagaaacctagtttaagtcactgtagtgggaattcacacactcttagccagtttctcaaactaagctagttcagacttggagcccgaaagcacactgcaatgtgaccacaggtgtgttttgtggatcttcagtaaaacattccccagaaataagtagggccatttcccagtgtgactataaactggagacaggtaaatattttttttggtggaggkggsggctaattgattttggctctgaactgatgctaatccatggagacacaaaataaagtaagatgaaatgaaacaaaygcaacaacaacamatccagcatagtccaccactcagagtagaagtttacagaacccaggtgatagatggaaccttgaccagagtcagtttcccagtgtgtccaatggcgtgatggagccattcagtggttacttctctagtctcagaatgaayggtgggaaaaggtatatttagcaactgttctttgattgatgaagcgaggragggctattatattaagaacattcaagtgaaagcctctgaaaatcctcagatcaccaaaatagtgttcccaaagtaactctgcaatctgggggaaattcagtggcgacagttgtgcaacggtgagtgtacrtaatgccaccgaatgttacacttaaaaacggttaaaaaaggccgggcacggtggctcacgcctgtaatcccagcactttgggaggctgaggcgggcggatcacgaggtcaggagatcgagaccwtcctggctaacacagtgaaaccccgtctctattaaaaatacaaaaaattggctgggcgcggtggctcaygcctgtaatcccagcactttgggaggccaagacgggtggatcacgaggtcaagagttcgagaccatcctggctaacacggtgaaaccccgtctctactaaaaatacaaaaacaaaagtagccgggcatggtggtgggcgcctgtagtcccagctactcaggaggctgaggcaggataatggygtgaacccaggaggcggagcttgcagtgactgagatcgcgccactgcactccagcctgggcgacagagggagactctgtctcaaaaaaaaaaaaattagcygggcgtggtggcgggcgcctgtagtcccagctactcgggaggctgaggcaggagaatggtgagaaccggggaggcagggcttgcagagagctgagatcgtgccactgcactccagcgtgggcaacaaagcaagactctgtctcaaaaaaaaaaaaaaaaagttaaaatgwtaaattttatgtaatatatactttgtcacaataaaaaagtaaatgatcataaacagctctrttgttttaacttgtacatatcgtgtttctttcattttaaagtagaaacagtagctatttaaaatcaaaagataatttcaaacattgcttgttgtcattgaattcaagaagaaaactttaaaaaagaaaaaccacacaaaactctaaaaataataaggccaggcgttggtggttcacacctgtaatcctagcactttggaaggccaaggcaggtggatcacctgaggtcaggagttcaagaccaacccggccaacacagcaaaacctggtctctagtaaaaatacaaaaattagccgggcatggtggtgcacacctgtaatcccagctactcaggaggmtgaggtgggaaaattacttgaaaccgggaggcggagtttgcagtgagcagagattgtgacactgaactccagcctgggtgacagagcaagactccctctygaaaaaaataaataaataagtaaaataaataaataataaagtgtactccatatgtattcaatytgttttattttatktttrtttgtatgaacatatacaacacaaatttaaaatatataagtaattaattgtggaaaatgggatctatcgtgaggataaagcaaagttatgcaacaagatgaagcaacaaaaagtgatttttgaggatgattgcaaattatcttaagtaatttagaaagttcacaatttcctgagctttaacagcattaacaggaagcattaagaacaaggatgtggttaggtgtctattggtttgtcagaaagacatgtaacatgaaaaccactgacattaagagacaggtarcagctttaataatttaccagccttgtatttcttcacattcttgtttcagagatagtttgaaaayagtccaaaaggaagataattccaaattcctgaggattttcmccaagtgttgagtgtactatataaagtgataacagaggattatgtggatgcataacccagtggcaacgaattccattttggccgtgaactactgaacagattcactgaatgtgttcatttgctgaacaaatcttatttcagcaaatgacaaaataagatttgttcagcacatctcatgtgagtgctcacatagcgtgggctctgtggtcagacaaacastrggcacttctcttggtgttatcaccttaagctgtgtgccttggggaaagttactcaatttctcattccctccatttcctcgtgcacaaaatggcagaaaataaaggtgttgtgatgattaaatgagatactgtatacaatattctcagtacaatgcccagcacatggtgagccttcaagaaatgctatctactagtcctacgtgcaatgcactgtggagagggctaaaaatgacatgtgtggcacgagttgcagtttaatcctgtgctccacttactctaagattcaggtatgtgttgcactagttggactagtggccaggggtcagaggaaaataagaacctcccgaaaatgtcttcccttattctagaggaagacagagttaagaagaaaagctttagctcaaggaaagggcattagagttaaaatggagggaaaaaatatctactaatcagaatattctactggccacagtctctgaccttctggcaattaaaawtttaaagttaaagattactyaaaattggctgggtgtggtggctcacgcctgtaatcccagcactttgtgaggccgaggtgggtggatcacaaggtcaggagttcgagaccagcctgaccaacatggtgaaaccccgtctctactaaaaatacaaaaattaaccaagcgtggtggtgggcatctgtaatcccagctactcgggaggctgaggcaggagaatctcttgaaatcagaaggcggaggttgcagtgagccgagatcatgccactacactccagcctgggcaacaagagcaaaactctgtctcaaaaaaaaaaaaaaaaaaaargattacttaaaatttacttggaaacttaaaagtgcaccattaagtaactcctgggaccaagcagatgtcatgagaaaaattaagaaatatttgccacttcatcagttataagacaaaaaaawwttttttttaaattttaagacatacttaaattgagtgataatgaatgatatggttgggtctgtgtccctgcccaaatctcatgacaaattgtaatccccaatgttggaggcggggtctggtgggaaatgattggatcttgtacgcaaatttcccctttggtgctgttctcgtgatagtgagtggattatcaggagatctggttgtttaaaagtgtgtagcacctccccactctctctattcctcgtgctctggccctgtaagaygtgcctkcttctcttttgtctttcaccatgattgaaagtttcctgaggcctccccagcatgcttcctgtacagcctgtggaaccgtgagccaattaagcctcttttatttaaaaattacccagtttccrgtggcacacacctgtaatcccagaactttgggaagctgaggtgggtggatcacctgaggtcaggagttcaagrccagcctgaccaacatggaaaaaccccgtctctactaaaaatacaaaattagccaggcatagtggcgcatgcctgtaatcccagctacttgggatgctgaggcaggagaattgtttgaactctggaggcagaggttgtggtgagccaagatcgtgccactgcactccagcctggtcaacaagagcaaaactccgtttcaaaaaaaaaaaaaaagaaaaattacccagtttcaggtatttctttatagtagtgcaagaatggactaatacaatgaaaacaccaaacatcaggctgggtgtggtggctcatgmttgcaatctcagcactttgggagcctgaggtgggaggatcacttgaggccaggagttcaagaccagcctgggcaatatagtgagacccaattgctacaaaaaaawttaaaattagctgggtgtggtggcaagcacttgtattctcagctacttgggaggttgaggcaggcaggaggagcacttgagcccatgaatttgagattgcagtgagtatgatagtaccactgcactccagcctgggcaacacagcaagaccctgtctcaaaaaaaagacagttctaaaaaatgaacataaggtataaacaccaacattcaacatgtacacacacacacacacacacacacacacacacacayacacmygcagttggccctctgtatttgtgggttccacatctggggattcaaccaaccacagataaaaaatatttggaaactaaaaattccaccctgcgcttctggacctcagcaccagccccagggctgctctaggggccacatggctgaagggagygcaaggagctaccagaggcagaatgaagagactgaagcaatgacagccacttattttgaggaattacgtgtcattgatgactatgccaaaacattttgtrttagaattagtgatgatattgattaccccaaatggacactttgctcataggtgatgctactgaattaatatacaggtacagctccacctacttattagtaggtaagactcttggcttaaaggacaagaatgtgcagatttatcaaatgggcttgagaaaatacaattcagaatattggtgaaagtattctttacctgtgggtggagaaaataagagatgctcggccacgcgcagtggctcatgcctgtaatcccagcactttgggaggccgaggtggacggatcacgaggtcaggagatagagaccatcctggataagatggtgaaacyccatctctactaaaaatacaaaaaattagccaggcgtggtggcacgcacttgtaatcccagctactcaggaggctgaggcargagaatcgcttgaacccgggaggcagaagttgcagtgagcagagatcgagccgctgcactccagcctgggcaacagagggagaaaaaaaaaaaaaaaacaactctaggggaatggaaatacctgatttccattccatttcattgagacactcacactgttaaaggaatattgccttttttttcttttttcttttttgattatataaatagagatgcgtctcaytatgttgcccaggctggtcttaaatactgggactcaagtgatcctcccacctcagcctcacaaagtgttgggattacaggcatgagccwttgtgcctgacccattttttgttttgttttgttttgagacagaatcttgctctgttacctaggctggagtgtagtggcgcgatctcagctcactgcaacctctgcctcctgggttcaagcaattctcctgcctcagcctcccaggtagctgggactacagatgcctgccaccacatctggttaattttttgtatttttagtagagatggcatttcaccatkttgcccaggctggtcttgaactcctgacctcaggtgrtccacctgcctccagcctcccaaagcactgagattacaggcatgagccaccgtgcctggccctgtctggcctttttactgctttttatggcttattgaaatagcttgtattagtcctttctcatactactataagaacacatccaagactgggtaatttagaaaggaaagaagtttaactgactcacagttcagcatggctgaggaggccttaggaaaytgatgatcatggtggaaagggaagcaaacatgttcttcttcacagggcagcaggaaggagaatgagggtcaagtgaagcagcaagctccttataaaactatcaaatctcgtgagaacttactatcacaacaatagcatgggagaaactgccaccatgattcaattacatcccaccgggtcccttacacaacatgtggggactatgrgaactaaaattcaagatgagatttgggtgcagccacagccaaaccctataattctgcccctggcccctctcaaatctcctgtcttcacatttcttttttctttttttttttytttttttttttttttgagatagagtmtcactctgtcaccaggctggattgcagtggcacaagcttggctcactgcaacctccacctcctgggttctagccattctcctgcctcagcctctgcagtaactgggactacaggcgcatgccaccacacatggctaattattgtatttttagtagagacggggtttcaccatgttggccaggatggtctcgaactcctgacctcargtgatctgcctgcctcagcctcccgaatgctgggattacaggcatgarccacactgcacctggccgatgataaacctttgaaagctaaaaagcaaagagatgattgcagactaactcagaagaactgagaaagctgaattatgtggcaacagtagagaaaaattgaaaacagaaatgattatattgtagaatcacaaacagacccagatcttctacctgctctcatgctgctggatgactgtttctccctagtttcagcagaagttggagtctgtggactgggaaacatcaagtacagctgagagctttgataccaaacaaaaatggaggtttacacaatcacatgcttgctgattgctaagcccctgcctcctgcctcacagccttcatcaatcatttagtgcccaaaccatgtcagccagatctttaccctctaggaaggggattgtcacacctttctctcaggaatcaaagcagcccaagaggaaagaagagaaactgataagattacccaacaaataaatggccctacagtaaactcagaaatacaagagctctccatatactgcaaacttccaatcagctgtagtccttcattcctcatcgtaagaaaccaaaaattaccagaactctaaagtaagcctctatcatgcaagacaaaaagcacacaagcagggaaagcaccttggagaaacagaatactatgtggatgaaagaaaactaactcatgttcagtcaaagcttctcataaaagaccaggtgccggttgggcgcggtggctccctcactcactttgggaggccgagggaggtgtatcacaaggtcaagagatcgagaccatcctggctaacatggtaaaaccccatctctactraaaatacaaaaattagctgggcatggtggcggtcgcctgtagtcccagctactcaggaggctgaggcaggagaatcacttgaactcagggggtgcaggttacagtgagccgagagcgccactgcattccagcctgggtgacagagcgagactccatctcaaaaaaataaataaataaaagaccaggcccrgtggcttacacctgtaatcctagcactttaggaggctgaggcgggcggatcacttgaggtcaggagtttgagatcagcctggccaacatggtgaaaccccgtcggagtgagactctgtctcaaaaaaaaagaaagtttctcataaaagagcagcaaagaaatctgttatggttaaaacatagaacaaacaaataacaaataacaataactaaggaagcttagtttattagaaatgtgccaggcaagggagatagtgagcaaatggagtcagtcaaatggacgccgagtagctttaacatttgagttttatacagtttcactgaggaggcgttagccaaaggatgcttttagggcggggataacaagagttgggggaggggcaggaaggaagggtagagttagggcaggaaagaattggtcaaaagttgcaaagttgagtcactgactgtgtygataggctaggcaaggctgtctgtgaaaaagtctgtggttttgtttcctgaacacctgggtccaagctgagctgttgctgacatagtttatctgtcttgcaaattgtggtctctgtactgtttttcaagttgtggtttctgtagttttccatttctcagtcttgagaaagataagataagaaaagatactgcattctgaaaacaagaacaagatgttattttgtaaaaagaggaacattcagagaacaagaagaaattttagacgttaaagacatgataagaaatgaacattttaatgaagaattgaaagataaaattgaggaaattacacagaaagcgtggcaaaaagacaaggagataggaaatgagagaaaaaaggtaagaaaatttatgaamtctatgaagttcagcagccaaataatagaatttccaggaagagtaaaacagaggggaagaaatcaacaatgaaatagttcaggctgggcgtggtggctcacrcctgaaatcctagcactttgggaggctgaggcgggcggattgcctgagctcaggagttcaagaccagcctgggcaacacagtgaaaccatgtctctactaaaatacaaaaaattagctgggtgtggtggcatgcacctgtagtcgcagctacttgggaggctgaggcagaagaatcgcttgaacccaggaggcggaggttgcagtgagctgagactgggccgctgcactccagcctgggcaacagggygagactccatctccaaaaaaaaaaaaaaaagaaatagttgaagaaacacactcagaatagaagaaccaaattgaaagtgtccatcataatagatgaaaattgtcctgcactaaagcatatgattgtgaaatgtaaaatatctaggacaaacaggagattctmaggcttccagaaggggtagaagggtggcacaaaagggtggtgggggagtcggaattggattgggtttctcagcagcaacacaggaataagaaaagaaacaaactaaaagaggaaggtgtggctttcttttcctccgggacacagaaggtcgtccttcctacctactggctgccctcgggggcaaccccttgcccagcaccaaggaygtcaagaagatcctgtacaatataagcaataaggccaatggcaaccagtgcagcaagatcatcagtgagctgaatggaaaaaacattaaaggtgtcattgcccagggtattggcaagttgccattgtgctctcccacaaggctgtggccgcctctgctgccccggctctgtagctcctgctgctggccctgcccctactacaaagaagaagaaacatgagaagaaggagtcccaagagtcacatggtgacatatgatttgacttcctgctcccctgccaattcccctggaaagaaagaaagaagggagggagggaaggagggagaggaaggggagtgggggaggggaggggagggaaagggaagggaatagaagaaacaggagagacgcaaagtgatggcgaaggaaaatcacaggatcaaaaacagcaaatgtagaaagcaactgatccggactgggagaggcataactcaaaagacaggcatgttggggatttgttatccaccatttaaaaagataaagccattcttagcccatgggtcatacaaaaacaggctgcaggtcagttttctgaccccgatctagtcaataaaaaagaaacaggatgaactgacactaatttctggaaagaaggaaggaaggaggaaaggaggcaggaaggaaaaaaaagaagaaaggggccaggcgtggtgtctcacccttgtaatcccagcactttgaaaggccaaggcgggttgatcacgtgaggtcaggagtttgagaccagcctgggtaacatggtgaaaccccgtctctactaaaaatacaaaaattagccgggcatggtagtgcacccctgtagtcccaactactcgggaggctgaggcaggaaaaacacttgaacccgggagtcagaggttgcagtgagcctggatggtaccaytgcattccagcctgggtgacagcaagactccgtctcaaaaaaaaaaaaaaaaaaaagaagtaagaagtaaggaaagaacaaaggaaggaaggaagcaagaaggaaagaaaaagaaaggaagaaaagaaagaagaaagaaaagaaagaagaaagaaaagaaagagaaagaaagaagaaaagaaaggaaggaaggaaggaaggaggctaggtagaggtgtgaccctggtattgataaagagataggggagtggtcaaaggcatttccctacatcatactgtaaggaaaattcctgggtgagcccacagaaacgacaggttaatccaaattataaactgagtaatctcattgtagagcctttgcataaatccaggatacctagttatccaatagtctccctggccagattgccaaagctttcgctgctctgggtcttcttcctcattgtagtccctgtcatcagggtttccacagcactcaactcattctccaagctttgactgcagtattcttcaggatacatcatcaatcatcttccctctgccttgacatggtgcttggcactgtgacccttgacacaatgttaagtgccttgacatattgctacactccccaaataagacttacttcaagtgaatatacattagatatctgcaggaaaaatgaagaagagcaagacagcaaccatcmcttccctttaagaattcccttcaagaacaaggatttttctccatataacaagaatgtgattgcaaattgcttcacaaaaaagtaatctggcagagctgtaatctccactggcctctccaaaaagccacaaataaaatagcctttgatatagacaataaattgtaaatatcagtagaagcttccttagaagctatcttgatgatagacactgacttttttgtttatttttatttatgttatttccattgcattatgtggcaaaatatttcacattaatctaaccatcagtctgctttctatcactatatacaatatttgccttttctaaaattttataaatgtggaatgatatcgtagaatcttcggtgtctggctccttgtatttagcataatgctttttttttttttttttttttgagacaatcctgctaggctggagtgcaccagtgtgatctgggctcgctgcaacctctacctcccaggttcaagcgattctcgtgcctctgcctccagagtagctgggattacaggcgcccaccaccacacctggctaatttttgtattttcggtaaagacagactttcaccatgttggccaggctggtcacaaactcctgacctcaagtgatccaccccactcggcctcccaaggtgctgggattacaggtgtgagtcaccacacccagctgtcttcagcataatgctttcgagattcatacatgttgtgatgtgtattggtaggttttttgtttgtgtgtttctattttgttttggctcacaaacagaaaaatctaaagtagctctttttggtaagtagctttgcattgtatggatgtaaaacagtgtatccattcaccagttggttgtttccagttgggagatacatactatgaaaaaaactccaatgaacagttgcacacaagtctttgtgtggacatgttttcatttcttttggggaagtacgtaacagttggattgctgggtcatgtggtaactctgtctttcacataatcagaaacyaccaaactcttttcaaagtattcataccactgtggtttgtgtccctccaaaactgatgttggaatttaattaccatggcgactctattaagaggtgggaccaggctaggcatggtggctcacgtctgtaatcccagaactttaggaggccagcgcaagaggattgcttgaggacaggagttcaagaccagcctggtcaatgtagtaagaccccatctgtacaaaacatttaaaaattagacagacatggtggcacacacctgtggtcctagctactcaggaggctgaggtgggaggataccttgagctcaggaggtcaaggctgcagtgagccatgatcatgccactgcactccagcctgggcaacagagcaaaatcttgactctaaaaaaaaaaggggaggtgagaattttaagagacagaccttaagccctcatgaatggattaatcttttcatgaattaacagattagtggggttatagtggaagggaataagttatctcaagagcgggtttgtgataaaagccagccttgcactcttcttatcctgtgatgccttcacatgttatgacacagcaagaaggccccctgcagttgtgactccttgtccttgaatccaagcacttgccagtttccagaactttaccaaatacatttcgtctgggtgaggtggctcacaccggtaatcccagcactttgggagaccaaggcgggtggatcacttgaggtcaggagttcaagaccagcctggccaaatggtgaaaccctgtctctactaaaaatacaaaatttagccgggcgtggtggtgcctgtaatcccagctacttgggaggctgaagcaggagaatccctttaatccgggaggtggaggttacagtgaaccgagattgcgcggctgtactccagcctgggtgacagagtgagaccccttcttaaaaaaaaaaaaaaaaaagccagtctctgtggctcacgcctgtaatcccaacactttgggaggccgaggtgggcggatcacgaggtcaggagattgagaccatcctggctaacacagtgaaaccgccgtctctaytaaaaatacaaaaaattagctgggtgtggtagcaggtgcctgtagtcccagctactcgggaagctgaggcaggagaatggcgtgaacctgggaggaggagcttgcagtgagccgagatggcgccactgcactccagcctgggcgacagagcgagactctgtctcaaaaaaaaaaaaagaaagaaagaaattttgttttattataatttacccagtctagggtattctatgatagcatcagaaaatggactaaggaacataccattttcattcttaccggcaatgttcctgatgctccaaattctcttccacgcctgatattgttagtctttttaatttgagtcattttagtgggtgtgaagtatagtttttattttcttattattatatttccataagttattgcggtacaggtggtatttgggggggtgtgaagtatatttcctcatggttttaattcacatttccccaatgaccaagtgatgtggagcatcatttcatgttggttttttgccattcacataacttatttggtaaaatgtatgttcacatttctctcttgttgttgatcattcttgccaaattttgtgtagtcttttaaaataactgctttgttccttttactttggatttattttctgtttttctgacttattataaatgattacttactaatataagtcttttaagtttatacatttattttttgtttgtttgtttttgtttttgtttgagaccgagtctcgctctgtcgcccaggctggagtgcagtggggctatctcggctcactgcaacctccgcctcctgggttcaagtgattctcctgcctcagcctcccgagcagctgggattacaggcacctgccaccacaccgagccattttttgcattttttagtagagacagggtttcgccatgttgcctaggctggtctgaaactcctgacctcaggtgatccgccctcctcagcctcccagaatgttgggattacgggcrtgagccactgcgcccggccaagtttatacatttctttctacacactacgtagctgcatcccacagttgtcatctgtaatactttttttttttttttgagacagagtctcgctctgtcgcccaggctggagtgcagtggtgccatctcggctcactgcaagctccgcctcccgggttcacgccattctcctgcctcagcctcccgagtagctgggactacaggcgcccgcccccacgccyrgctaattttttgtayttttagtagagacggrgtttctccttgttagccagtatggtctcgatctcctgacctcgtgatccgcccgcctcggcctcgcaaagtgctgggattacaggcgtgagccaccgtgcccggccgtcatctgtaatactgtttattacattcaaaatgtttaatttgtgtctttcttatttcctagcacataaaggaaattttttagctttttttattgtttatttgtagcttaatagcattatacataggcataccttattttattgcacttcattttatcatgctttctagattgtatttttgttacaaatcgaaggtttgcggcaaccttgtgttgagcaagtatatcagtgccatttttccaacagcatgtgctcacttttgtgtcgttgtgtcagcattttttactgataaactatttttaaaataaggtatatttttagacataatgccattgcatactaaatagactacattatagtttaaaaataactttatgtactaggaaaccaaaaaaaattgtgtgacttactttactgtgatgtttgttttattgcaatgatctggaactgaacctataatatctctgacatgtgcctatggtcagagaatgtcctcattttaattctgtcaattttcttgagatttgatttacagacaatctgtcttcaattaataaaaattttgcgtgcttaaaaagaatgtgatttttgcagttgttagtatagcgttctatgcttctaccatagtaaatatgtaatcatgtttatcaaatctactcgatgaacattttctgtcaattattaattttcaaatyctccaatatgattgaatataaatttgtctgtttcttcttttttttttttttggagatagagtctcactctgttgccaggctggagtgcagtgacgcaatctcggctcaccacaacctccacctcccaggttcaagtgattctcctgccttaacctcttgagtagctgggattacaggcatccgtcaccatgcccggctaattttgtatttttagtagagatggggtttctccatgttggtcaggctggtctcaaactccygatctcaggtgatctgcccacctcggcctcccaaattgttgggattacaggcatgagccaccatacccagcttgtttcttcttgtgatgtttttgctttatattttttttaggctatgtttatatgtttacaacctatgtatatatgtttataacctatgaatatatcttaataaacctatgtgcataagtttcagtctatgtacataggtatgtctatgtacatagaaaagaaacccacacacagacataaaatggtgaaatttcagaacaacaatgacaaagaatgattataaaacagcaggagagaaaggagattatcttcttttttctttttgagacagagtcttgttctttcacccaggctggaatrcaatggctcgatctcggctcactgcaacctccgcctaccgggttccagcgattctccctgcctcagcctcccaagtagctgggattacaggcacccaccaccatgtccagctacttttttttttgtatttttagtagagacggggtttcaccatgttggccaggctggtctcgaactcctgacctcaggtgatccacccaccttggcctcccaaagtgctgggattataggtgtgagctactgcgccagcaaggagatcatctcaaaagaagctgagttagtgacagctggcttaaagacaatgtaagctggaagatagtgaaatgttatcttcaaattgctgaggaaaagcaactgaaaatttggaattctaaacccaattaaatttttttttttttgagctcaatctcagctcactgccacctctgcctcccaggttcaagtrattctcttgcctcagcctcccgagtagctgggattacaggcatgtgccatgatgcccaggtaatttttgtattttttatagagacggggtttcaccatgttcaccatgctggtctcgaattcccgaccttgtgatctgcccgacttggcctcccaaagtgctgggattacaggcgtgagccacctctcccggccctaaaatttgttttaatgaagacaaaataaaattgtttcagacaaataaaactcactctttcgccagcaaactctccctataggaaaaatctaaagtatatattttagctagaaggaaattgatcctaaatgaagctacaagaagaaacaacatgtaaaaaagactttgggtaagtataaaatattaactataaaacaatgataatgtttagtaatakttaaatttgaaagaaaaaagataatattaaaacatatgacaggtctgtgttctggaggagataaagaaatagattaactttgtaatttaagtaatcacaatgcagcttatagggtaacaaccaaaaaaaatcaacccaaaaaacaaaaggcaaaaaaagcatctcaaacctgaatagagtatttaacttccaaactagcaaggaagaatataattaataccaaaaaagagtcaaaaaaaaaaaataggaaggccaggcatggtggctcatgcctgtaatccaagcactttgggaagccaaggctggcagatcacttgaggataggcgtttgagaccagcctggccaacatggcaaaatcccgtctctactaaaaatataaaaattagctggggatggtggtacacgcctgtaatcccagctactcaggagactgaggcaaaaggatcacttgagcccggaaggcrgaggttgcagtgagccgagatcacaccattgccctccagcctaggtgacagagcgagactctctctcaaaagaaaaagaataggaagtgaaagatagtataaactagggcaatagattttttgagactaatttcattaaaggtaaataaactaaatgccttagtagttgtctcagtcagtttaggctgctgtaacaaatatatcataggctgagtacttaaataacagaaatttatttctcacagttacagagactggctgtttggggtttgtttttctgtttctttttcagaaacaggggtctcactgttacccaggctggagtgcagcggcatgatcatagcttacggcagccttgaactcctgggctcaaatgatcctcccacgtcagcctcctgagtagctaggactacaggcaaacaccactgcaaccagctaattttaaaaccttttttgttactgtttttttttgagacccaggctggagtgcagcggcaagatcttggctcactgtgacctctgcctcccaggttcaagcaattctcctgcctcagcctcccaagtagatggaattacaggtgcatgccatcacgctcggctaatttttgtatttttagtagagacggggtttcaccacattgaccaggctggtctcgaactcctgacctcgtgatccacccgcctcagcctcccaaagtgctgggattacaggtgtgagccaccgtgcctggcctcatttccccacttctacataccatctgccatttcatttgggaatatgctgacgaatacctgacacgamccatcrccgacttctctaatcacttcctacagccaggagactgggttctggtaaaagatcccagtcctctcctcaatcctcccctcacacttaaatggaatgggtcttaccagatcatctttactacacccacttaagcaggaaaaaaaaagtttcttgtactaggctaactcactttgaggctcagcgataggcagggctctggcagggctttgatagccctgtctgcagagccagggccctcaagggatgagccccagagcctctccctcccatcttggagcaggggtgagaaaaacaagtttttctcctctttcagcttccccttccccccttaccattctcataattattttgcaaagttttgtaagttcctgtttttccttctgtataaggtcacaagatatgtttaagttgcacaatctgtcactgtttcacaaactgcctttgttctgcttctgtaagcctgcttgcccgccctacaggttttgcaccatcaaactggtgagcccctttttggatgcaygtatagccaacccccttttggatgcatgtataaaagtcaagccctgtctttgttcggggctcagcctttggatgttaatcctctgggctggtacacacctaataaatcctcctgtcccacccattggtctcttctgtcccttgattcctgcaacaccacaggagcaaaaccccagggactccccagctggtttcattatacatctctcaagacaacagacttcactacataccaaaacaaccaaatcaaaacccccttcagccttctcttgtgtctccacaggacccacttcccttcgcctcaccaaatcctggaggaaaaggaagagaaatttacataagctgctatgtctctttctctctcaaactttcattgcttcccaaccaatcttgttacagacctttattgrtaccattatgaaactcccattatccatcctgatcagctccttactattctatgggacttacggcttcaagsaattttccaggactttactcctactcaaataacctttttctccttttgcttgtttctttcaatataaattctgtaatcacatcaaccttaccaatacaaccactcctcactgctctcaaactggaatgctctataaaccttacacaatccctcatgctgcaagctaactcttcctttgctccagaatcctggatgtgcttatcactgtcttcctcagcctatacagcccttcctacaccctttcatgaccttttaacaggaaacataaccataatctataaactccaaaaaggagcttccttttttgaaagagctgacrccctggtaggtgattatgccccttccagggccaatcaagccaacaaatcatttcaaacctattacaactccctacaatgcctcaagccccaaggccctcccattgaagggcccataactaaacacaccgcccttttacaacaagcctcactttgcttttcagcctgtgagggaaatttccctgtagggtccttaacacctaaccaatgcactatcattgttaaacacccctctgaccatcacactaaccgagttgactatcacatatcacctgatgcaaatggggcatttccacaactggctcgttttacagcctctccctcaaccgatgcctctgacctaatttgtgctgtccctagtgcccrctktattcatggctcaatatcaatggtgcaacatctgattgtattaaatgtataaagaataactcttcctatatctctactatagtggatgtctctctggcctcctccttgtccatctggagtaatgaaccacaggaaagaaaaracacttcagccttaattcacttgctttctttccatatctctgcctatatttacaacaaggcttattttttattttattttatttttttttttgagacaaagtctcactctgttgcccaggctggagtgcagtggcacaattttggctcactgcaacctccacctcctgggttcaagtgattctcctgcctcagcctcccgaatagctgggactacaagcgtgtgccaccaagcccggctatttttttttttttttttgtatttttagtagagacggggtttcaccgtgttggccaggacggtcttgatctcttgacttcatgatctgcctgcctcagcctcccaacgtactgggattacaggtgtgmgccaccgcacccagccaagtcttattatttttatatggaaccagtacatatctttgtctccccaccaactgtaccagaacatgtactctagtttatctttctccctgcattggactaattcctcctagtcaacctttgcccattccatctgcccaatatgttaggaagaggagggctttccatgtcattcccttgatggccaccttgggtataaccgccggacttagattgggagcaggcagattggccacctccttaacatactttaaagctctttcaacagaactacagcgttctttagaagatacagcccaaagtcttataagagtccaagaccaactagactgcttggctggagtaatcctccaaaatagagggggactagatcttataatggctgaaaaaggagatcttaaatggcctctgcctctcgttggatgaggaatgttgcctmtacctcaaccaatcaagcctagtaagagatgctgctgaaaaacttacagaaagggctaaaagactaagggaataccaaaacaaccaaatagattgttggttttggaacaaaatcacaacatgggtcatcccattcctgggccctctcctaatgatgtgcctaggactaatgtttttaccctgcctaattaacctttttcaaagatttttaactgacaggatcatggccatttcacagacaactacccaaaaacatctacagacagcattagtcctacagtcaatctgagatcaaagaactctccgcactcctccccttagcaggaagtagccagaaagaacacaccgccccttgtccttytataactataggatctggattgacagagcaagagcatcaccatcttggacaaacactgccattttaagttscccttgattaaaaaaygcctaatccagccccagaaacatcaccctaatggcyaatgtcagcatgaccattaaatgacacctccaaccggaaayrttccaaccccaagataaatccccctccgaccagaaacatgccaaccccacaataaaactctcctccacccagaaayattccaaatctgcgataagctctccctccctaaacccttaaatattcttagtctataagagagaaggccccgacctaaaccagccagaatcccctctcaggtttattctccaaaatacacttgtctgtgattattgagcccctttttgtgtttctttcttcttccttaaacccttacagttgtattgattatagaggcaatagtggatcatagaactatgccttgtgttagttacagagactagagtagcttgtcctggcaagactgttgctgactagctgcgtttcagacattgagctgtctctgattagttggtttttgaagacattttcaccaaagcaagctgccattgatttcagtgggttaagccagttctgctacttacttgttactatggctgtagaacttttcckaataacataaagactttttaatattcagctctctatcttaaggatattaaccatttgtcatcttgtttaaatttttgttctctatttgtcttttaatttgaggattctttaaatgtaaaaatctatrgtttgtaaaatctccttaccatctttttttttttttttttgrgtcattttcactcttgttgcccaggctgcagtgcaatggcacaattttggctcaccgcaacttccacctcctgggttcaagcaattctcttaccttagcctcccgagtagctgggattacaggtataccccaatatgcccagctaatgttttgtatctttagtaaagacagagtttcttcatgttggtcaggctagtctcaaactcctgacctcaggtgatgcacctgccttggcctcccaaagtgctgggattacaggtgtgagccaccacgcccggccaccatctttatactttctatttttttggtttaaaatctttcattattcatagcatrtgatgagagactttacactctatatcattctcattttcaaagcaaccatagactatattgattcataatagttttatgtctatgtatcttgcttccccaaagattccaaactccatgaagccagggtttaaasaatttttactgcctacatcatatattatggtgtatgtgaggtatgtgaggctgcagtgtaaggcctgaactggaatggtaataagtaagactgggaaaaaaaatagaccagccagtagggtatgagtttggaagggttgatgtaaaccaaggacaagttggatgtgggaaaagactcaagaagaggtaactgaggcaagatggttgaaatataaagattggtcatataaaaacatcccataacaagtaaacttaataaatccctagggaggattaggaaactgaggacttaggttgcagctttatttaatggctacttctgaagttagtggacaaaagccaccataattaacatgcttactctagggtggtccttaaagttacataaatccccaagccatacctaggacatcctcagggtaatcaaaatcacaaggtgttttcctttccccaaaagattttcaaaaaaagtatacatttcatattaagttattgccatccatttgttttttgtttctgagacagagtttggctcttgttgcccaggccgagtgcaacagcatgatctctgctcactgcaacctctgccttctgggttcaaatgattctcctgcctcagcctcctgagtagctgggattacaggcgcccaccatcacacccggctaatttttgtattttttagtagagacggggttttgycatgttggccaggctggtctcgaactcctgacctcaggtgatccaccgccttggcttcccaaagtgctgggattataggtgtgagccrctgcgcccggccattgccgttacttttaatgtcaaaaaccacagttacttttgcaccaaacccattaaaaggcagcattgttttcacccagacttctcattatgtgagataaattttttcatgataatgaaagaaagaggaggaaggaagaaaacagggagagaagggaggaaggcagacaaaaagaagaaaaaaggaaaaggcaagtagcctagaaatgaaaagtcatattcagtggcctgacaggtatgaaggaggaagcacagagtctgggtttccttgagggcttccagttaagggctaaatgtataatgctgctgttcagggatgcaaagatatttagaggccacctagttcaaccccatcgagaccatcctggctaacacggtgaaaccccgtctctactaaaaaaatacaaaaaaaaattagccgggcgtggtggcrggtgcytgtagtcccagctactcaggaggctgaggcaggagaatggcrtgaacccaggaggcagagcttgcagtgagccgagatggcaccactgcactccagcctgggcaacagagcgagactccacctcaaaaaaaaaaaagaagagacaggccgggcacagtggctcacgcctgtaatcccagcactttgggaggccgaggcgggcggatcacgaggtcaggagatcgagaccatcctggttaacacggtgaaaccccgtctctactaaaaacacaaaaaattagccgggcgtggtggcgggcgcctgtagtcccagctactggggaagctgaggcaggagaatggcatgaacccaggaggyggagcttgcagtgagccgagatagcaccactgcactcccacccgggtgacagagcgagactccttctcaaaaaaaaaaaaaaaaaaaaaaaaaaaaaaagagattmctactctgttgcccaggctggagtgcagtggtgtgatcacagctcactgcagtctcgaactcctggcctcagtcagtcctcccacctcagcctcccaaagtagctgggactgcagctgtgcacgaccatgcccagctaattttttgaaaaaattttttgtagakacaggartctcactatgttgcctgtctttggkttggattaatttgctaaagcagctcacagaactcaggaaaacacatttaccaatttattatgaaggatattacaaaggataccgaggaagcaatgcatagggcgaggtatggggcaaaggatggagagcttccttgccctctctaggtgcgccacactccaggaacttccacatgttcagctattccaaggctcgcagaaccctgttctcttgttatgtaagtttcagtacgttcagtacgtaggcatgattgattaaatcatttgcctttggtgatcaacttaamcttcagcccttctttgctccctggaggttgaggggtggggctgaaagtcccaattcttattctgaygttggtttttgaggtaaccagaccccactgaagctacctagaggctgccaaatttaagtcaactcgttagcatacaaaaagacacatcactttgaagattctaaggaggccgggcatggtggctcacgcctgtattcttagcactttgggaggccaaggcargaggttcccttgagcccaggagttcgagaccagcctgggcaacatagggagacactgtctttattttttttaayaaataaatagtttttttaaatgaagattctaaggattttagaagttgtgtgcccagaaacaagatgaagaccaaatatacatttcagagaaatcacaatacttaatgctgaattattgtattaagtagattggaaatagtgaatttatccttttgtcctatatatttagttgtgatatatataacataaaaatttgccattttaacaatacttaacaacttaagtattgttaaaatggcaaattttttttttgagatggagtcttgctctgttgcctaggctggagtgcagtggcacgatcttagctcactgcaacctctgcctcctgggttcaagcaattctcctgcctcaacctcctgagtagctgggattacaggcacacgccaccatgcccrgctaatttttgtatttttttagtagagacgggtttcaccatattggtcaggctgatcttgaactcctgaccttgtgatccacctgcctcagcctcccaaagtgctgggattacaggcatgagccactgtgcctggcctaaaatggcaaagttttatgttatatatacttatcacaactaaatatataggacaaaataataaatcaggaaacacaatggaaaagtttccttacaatagcaggagaaactagactacctacaaagactgcataaaactgtatgattgtataaaaagatataaacaaccaggtgcaatggctcatgcctgtaagcccagcacttagggaggttgaggcgcgaggatcacttgagcacaggagtttgagaccagcctggacaacacgatgaaatcccatctctactaaaaayacaaaaactaggccaggcatggtggctcacacctgtaatgccagcactttgggaggcttaggcgggygaatcacgaggtcaggagttcaagaccatcctggccaatgtggtgaaaccctgtctctactaaaaatacaaaaattaactgggcgtggtgtgcgcctgtaatcccagctactcaggaggctgaggcaggagaatcgcttgaatccaggaggcagaggttacagtgagctgaaattgcaccactgcaccccagycyggcaacagagcgagagtctgtctcaaaaaaaaaaaaaaaaaaaaattarctgggcatggtggtacacgcctgtaatctcagctactcaggaggctgaggcaggaaaactgcttgaaccggaactggggaggcagaggttgcagtgaactgagattgagccacggcactccagcctgggctacagagtaagactctgtctcaaaaaaaaaaaaaaaagaaaaagaaaaaccagctgggtgtggtgggtggtgcatgcctgtagtcccagctacttgggaggctaaggtgagaggatcacctgagcccaggaggcagaggttgcagtaagccaagattatgccactgcactccagactgggtgacagagcaagaccctgtctcaaaaaaaaaaaaaaaaaaaaggatrtaaaagaacacctggataaatggagagacagtctctggatcagaggactcaacataaaattaaaaattaaaaacaggaaaatctcttccaattaatctatgcattctgtgaaatacaaaggaattcttaacagtatttatgcatacacacatatactatagatagatatatagataatagatagagtgaaaagaaatccaaaatagagatgattatgtcagaggtctctaaaaaggagccaagagggcataaggagttgggagttgaaccccagtcacgtacacacccagaaggaatttgacctctttgaactgagccaaatttaaaacttctttaagaarcagctgyatttgatttgaactatttacaccaggtctaatcaccaacctcctgaggagacaactgtgctgaattaagctcattactgcctagagacatacaagctgtcaatcaaccattgtcaatcatggattgtgctaaaattttcaacttgtgtaaacttgcaagaaacctttataagcccctgcccagtcttgtctgaatggaacagatttgtgtctcctaaattgcaagtcatgaaagaccccaattaaaataccttttttttttttttttttttytgagacagggtctcttgctctgtcacctagcctggagcacagtgacacaatcttggctcattgcaacctccacctcccaggctcaagtgatcctcccacctcagcctcccaagctgggactacaggcatgcgccaccgtgcccagctaattttattttttgtagagacaatgtcttactatgttgcccaggctggtctctaacccctgggttcatgtgatcctcccacctaagcctcccaaagtattgaaattacaggcatgagccatcatgctgggctaaaatatcttctcttttgtttgctgatccacagcgttggttttatttcttattagtttatattacgtggtgtcagaagtgggatacagagcagttccctcttgatctctgatgccaccatggacccaagcaaaggtacctgcaggacgcttttgcactccattgatcttgatagcyctggaattcactgggtgagtcctcttrtgttctaaacctcctgacatggttcagattgaggccttttttcaggtgttttctgttgccacttttaattacaaggatggcttcattgttttggggagtgtctcaaataagaacctatgagggaaagaaaaaaattatattttctcctctacaatttgrcaactcagttgggaccaatagagacactccactcactccaagacctataagtggaatcctgggagaacttgcagaagccaatataaataggtaggatttttatgaaagtcagcttctcccagacttctttttttttttttttttttgagacagagtctccccctgctgcccaggctgtagtgtaatggtggcgtgatctcggctcactgcaacctctgcctcctgggttacagcgattctcctgcctcagcctcccgagtagctgggattagaggcacctgccaccacatccagctaatttttgtatttttagtagagacggggtttcaccatgttggccaggctggtcttgaactcctgacctcgtgatccacctgcctcggcctcccaaagtactgggattataggcgtgagccactgcgcccaactagcttctcccagacttctatttgtggtacctggtcaagagaggaaggtaaaaaatttccctgtttcttcttttccaggttcagattggcaggaaaaaaaaattacaaataaaaaacaattagttttttgaaatgtgactcttgtgaatctgcttcaggtactgttggttattgttctttagtttccaaagatggtctttatttcccttgtcgctctctttttgtagggcttctcataaggaggaaaaatcataagattctcctttcatcctgcttaatttcttgagaagcttggctttgtcaccagcaaatttattctccagtctctaccacctcagagagcgtacattgttgagcttatgtcagatggccagctgtgagtccagccgggggtctgaaatgtctgttttttcaaatgtgtcatctctcagggaaatttgtcttaattgtctcaaccttcattgccttgataatgagggtctttactttcttaggctatcttcagaagaaatttcagatcttgaggggaactgcatacttgcaccctcttcaggcataatttatgcatctgattatataccataaaaaggcttacaggttttgagtcccagttagaggtatacctttggaaatttattttgttttgttttgtttgagacaagctgcagaggttgcagtggcacaattacagctcactgtagtctcgacattccaggctcaagtgattctcccacctcagcctcccaagtagcagagacttatacatgcatgtgccaccatgcctggctaawtttttaaaaaaaatttttgtagagatggctttctcactatattccccatactggtttcagactcctggactcagagatcctccagccttggcctcccaaagtgctaggactataggcatgaaccaatgcacctggccaacctttggaaatttggactgttaacggctaaaacttttttttctggagagttctcctttaacacccgcagaaaattctttaaatgttcaaattgcctgctcaactttgctgcaggatttactaaagtcactccagcattttccaggcctttctcagtcctttggagatgtaaaccttaccatgtttttgaaatgttagcatttagggaattagctaagcagcattccakcgagattggatttgaaacagagctaaagttctccggaccaaccaaaaaattcctttcctcaggggatgtctttagctcaggggagaaacatttataagaattagcttggttaattgttttgaatttttggtgtgactcttgaggttttggggtgcccatttgtaattctttccacccccatgggcagcttttgttttcctcttttagtgactgtctcttctcattgtctgtctgctgggcacacaagggaaggtctgcctttgtggaaggtctggcagacactgggctgaaaagctgaggccatagagaatatggtgaacaaatgtggggttgcaccccaattgttgctagggaagctttctctaagctgtccttgggagggtctggatcctgtaagggctgctaacttttgctccctctttgggaaacttgattaaagccaagttttaatgaagggcttggtttaaaagggcttcttggtttgggtctcctgtgtgtttatttgtgttggttttctcatttgttcaggtatacctttgattttaaacatcggtttatattttaaatataaaatatttatatagtttatatttaaatttatgaaatttataaatttatgaaaactttttgttcctttgtttgttcagccttctctcctgagctaaatggaaccacatactcaacaagtttattaaaacatttcaaagacaacagctttaaatagtgattattctagtgctgggcatggtggctcacgcctgtaatcccagcactttgggaggctgaggcgagcggatcacttgaggcctggagtttgagaccagcctggccaacatagtgaaatcctgtctctactaaaagcacaaaaattacccaggcatggtggcacgcgcctgtagtcccagctattcaggaggctgagacatgagaatcacttgagcctgggaggtggaggttgcagtgatctgagaccgagccactgcactccagcctgggtgacagagttgtctcgggaaaaacaaacaaataaataaaatagtgattattctagacctctaataggcaaatatacccccacccctgcaaaaacaaacaaacaaaaaacaacaaaaacaaaaagcttcttcttggtgcaaatttcagaaatgaagccaagaaataggaatgtttgctatttgtccatctaaaatctggtcaaaagattttttttaagagctctacagtcaaaatcgacttttgacttttgactttttagagcatgagaatcccttgaacttgggaggcagaggttgccatgaaccgagatcgtgcccctgcactccagcctsggtgacagagtgagactctgtctcaaataaccaaacaaacagagccaaaagtatataagcttaaactcgaatttagtaattaatgtcttagcattatatcttatttggaaatgacctagatattcaatgactatccrtaatttaatttagcttagcaaaattctaaaggtaaccattttttattactgtatgttaggtaaatatcataaaagtaagaaacttaaagttaaatacatgcatgttttgctgacaactcaggagacataattgtttttattaaaccaacaatattaaactagccttgtctaccaaaagatttactaaagtcacataaacttaaaaaatatttcaacttatttatgagcactcatttatttttaagttaatttggtaccatgtagacaatacacaaacatatgtatagacatataaatacatgtagatacaacatatatcatacacatgtatgtgyctatttggctttgtttctttgtttgggacatggtctcgctatgctgtccaggatggcctcaaactcctgagttcaaatgatctttctgcctcagcgacctgagtacctgggattatagccatgtgccactatgcccaactcacatgtatgtatctaaaagccaaaaggatcaaggttaaatatgaaaaagagtagagagttagacctgagaggaacctatccacccacagctcttggggctctacgaggaaaacagtgatcctcccacccccagaaaaggaatmtgtggccttcaaggggtcctcaaggagacccaggactgttataagtcttcrttaccagctgggctcagtggctcatgcctataatcccagcactttgggaggctgaggtgagagtattgcttgaggccaggagttcaagaccagcctaggcaacacagygagaccctctttctacaaacaattaacaaaaattcaataatattaaacaaaaataataaaacatagttgttagttgccctcatgtggtagcaaaggtggcaagaggaaggagggatataaatggaagaacaagtcttagaggagccagtttgaggtcttgttcccaaaaagccaaataaattttacattatccttggcaaaattaatgtcaacaagaaaaaaagcagagaggtggagcacatatagtcagctggagtttaagaggagaggaattcaggctgggtgagatggcccacactttgggagaacaaggtaggaggattgcttgaggccaggagttcaagaccagcatgggcaacrtagtgagacgaagtctctacaaatatatatttttttgattagccagcatggcagcatgcatttataatcccagctatctggaggctgaggcaagaggatccctcgagccccagagttcgaggctgtagtgaactatgattacaccactgcactccarcctgggtgatagagtgagaccctctctctctcaaaaaaaaaaaaaaaaaaaagatttatatgtattatatatgtataaatacatagcctaaatatcaacttttacttaaattatacaggaggtatttcattgtcaaataagaaataacgttttaccttcttgaagttgtatttgtataaatgcatttttaatatgtgttccaaaattgtataaaatttctaaaaagatctgatatatcttggtatgtgttatcagtcataattctaattattgtgttaaattgttgacaccacagaaataaccatacttccttatcagttccatcattaatcatgactattctcttttgtcatccacaggcaattgttattttaccttgtttttttttttttttttttttttttgaggctgagtctcactctgtcgcccaggctggagtgcagtggcacgatctcagctgactgcaagcgctccgcctcccgggttcatgccgttctcctgcctcagcctcccaagtagctgggattacaggtgcctgccaccacgcctggcgaattttttgtatttttagtagagactgggttccaccattttggccaggctggtcttaaactcctgacctcgtgatccacccgccttggcctcccaaagtgctgggactacaggcgtgagccactgcacctggcctaccttgatcttgattctcttcaaaaggtggtttataatcagctacagtctaaaatttgctttttttttttttctttggagacagggtctcactctgtcaccactcaggctgraatgcagtggtgtgatcatagctcactgcagccttgamctcctgggctcaggtgatcctcccacctcagcctcccaagtaactaggaccacaggcgcatgccaccatggctggctaatttatttttatttttttgtagaaatgaggtctcactatgttgttcagsctgctctggaactcctgggctcaagtgatctgcccgctttgaycttgcaaagtactaggattacaggcataaaacacgacatgcagccccaaatttgctgcttcttcaaggaaattcatgaaaaaaaaccataacaagcattcttgaatacagattttttataatttttgagatcataccattggactaggtaaaaacttccagaactctratgagtaaactaaagtgttcatgaagattcctaatccgacatcaagaaaaacaagaattaattacatgggactcaactgatgaagaattgaaattttttatgagttctttttatctgaagcattccacattctttatattttgttcttcagagtcaaggaaaattttattcttctttaagctatttatagcttagatcaattgggtaaagtagacttttgtgagcagaattgaaacatttgcatttctgtctacctggtcccttcagaatttggaaaccatttgtgattaatcttcttttatggcaatatagtcatttgcataagttcartaacaatttgctgtctttgtaggaagagacattagacccaacaaaactccttagaatccctagcatgtgaaagattagataatagaagagtttcagattatttactcagtgctcaaggaggagtctgctatatccaacacctcttgttctgcttgggtaaataaaaaattcaaggctgggtgctgtggctcacacttctaatcccagcactttgggaggccaaggcaggcaggagttcaagaccagcctgggcaacatggtgaaactccatccctaataaaactacaaaaattagccaggtgtggtggtacacacctgtagtcccacctactagggggtgctgaggttggaggatcacttgagcctgggacgttgaggctgcggtgaactgagatcccaccactgcactccagcctggtgacgaygtgatagcctgtctcaaaaaataataataawaaaaaaattcaggtagtactggaaacctcgaagattccaagattagtcagatccttaaaaggtataccttctggtagtctttttaattgggttaatcttgaattttctgatcttttttgtttgcttcctacagttattggaaatattttaagatctgggttccaacttatcctgttattcttgtttgtgaccctagtcatgtttatcctcgttaaactatattcttgttaaatggctttgaggtagtcttgttgcctgaggtattacctggagctctttgtctcatgaccaagaagagtaaggaatgtggacaccaagggtgagtttagagcaaaagtttaataagtgaaagaggaaagctctccactgcagagaggggacctgagagggttgccatttcacaattgagtacaaaggctgttatgaggaacccagaggaaccagatgggtctgggcatttcatttgcataactgaaattgcataagttgtgaatttctggtagctccaccctgtacccctagtgtgctsgctgactggtggttgtctttagaaaaggcaccacttagaaaatggcatgatggtgtaaaggaccaactggagccttggctcacaaccagcctagtgttggagtgatgattcatagaggtttggctcacagtccaaagtatgcccaaaaaaggaaaggaatgtactcaccacagcccaccatctacatgcccacaraaggaaaagaaactatttcctggaaggctgctgcttacacaaagaacaaaggtgcttctatgttgggccttgcttccttatctgtgcagctatgggtatatcctaggcaagctgcctgtgctagtkcccttatctgtatctgtagcctgagttttcaggttgttcctttgtytgaaagaattctacwgagcacctgccctaaccgccttcctagctggttctttcttttctcctctctcagcttgatgccacrctgttgctgtcaacgaaactaaaattatggtggctcaacacattgaactgacagatyaggcctacaatcatgaatcctaccctaaccacatatgtgcaccacaattggggcccacatcctcaactcctccttgttgctcaaatttggactattccatttgacacagatcatccactatcattacyatgactccctcctccatgggacatgacttcctgggacaaatctattccagaaccaaagggcttactgaaataattgatctcagtggtttctaaggaaatatttaaatmaaaaggggaaaatctgaaaagaaatccaaaatggagatgattatgccagaggtctctaaaaaggagccaggagggcataaggagttggacccccatcacccatatactcagatgaaatttgacatgttcaaattggaccaaatcacaaacatcctaaagaagcagctgaatttgatgtgaactgtttacactgggcctgatcacaaatctcctgagaagacagctgtgccaaattaggtcgttcatcaccaagagacatctaagctgtcaatcagccattgycaatcatagactgtgctaaaattttccacttrtataaacttgccaggaacctttataagcccctgcccagcttgtctgtatggaatrtgatttagctgcttgctcgatttgtgtctctcaaattgcaatttataaaagatctcaattaaaataccttctctcatatgcttgtctgcagtgttggttttacttcttattagttgccaatagataaaaaatggacatgcacaaaaattgattctatatttatctaggatgaattgttcaataaatagtattgtgacaactgagtagccagctggaaaacgagagttgaactcctacagcttaccttccattacagttaattctaggtggctcaaagatgtaaacattttgcaaagttgtaaatccataatgaaaacmaggaaaagatgtacatcctcttcccaagcatgctaaagtcttaagcaggcattacataaaataggaattacaaatagcaaacagttaaagctgttatcccccatagtgaagaggaaagccacaaagttatctgtgttatccaccagaatgactgagtttattttatttatttatttatttattttatttttttgagacagagtctcactctgtcgcccaggctggagtgcagcagcgtgacctcagctcactgcaaactccaccttccgggttcacgccattctcctgcctcagcctcctgagtagctgggactacaagcgcccgccaccacgcccagctaattttttgtgtttttagtagctgggattacagttgcccactatcatgcctggctaagtttttttttttttttttttgagacagagttttgctcttgttgcctgggctggagtacaatggcatgatctcagctcactgcaacctctgcaaaayacaaaaattagctgggtatggtggcatgcacctgtagtcccagctactcgggaggctraggcaggagaatcgcttgaacctgggaggcagaagttgcaatgagccaagatcacaccactgcactccagcctggcgacagagcgagactccatcttaaaaaaaaaaatatatatatatatatatattttaagaatgtccatttcacctttgcaaaagccaaaagatagaaacaactcaaatatgatctatagaatatccatatagtgatacccaagaagctagaatattagttgcctttggagaagcaaactggatggctgagatgcagaattgggagtgtgattaatttttccttttattcttttgaccatgcctagattctaccagttaaaaataatataaattattaataaaaacatgaagagttgattaacatacatcacatattttgagtacagggataaatatgggagacatgctgtcccagatatcaaaatataaagctatcaaaacattgttggccaggcgtggtggcacatgcctacaataccagcactttgggaggttgggggaggagactggcttgagcccaggattgtgagaccagcctgggcaacatagtgagactctgtctcaaaaaaagaagaaaaaataacattgtcatatttaagcagggacaaattggccactgaaaaagaataaggtccagaaatagactcaagtgcatatgtatactatatagcaacctaaagtttcctttcaaattgtggggaaagatgaactattcaacaggtgctgttttgtttgttttcaagaaaaataaaaatccttacatcatatcaaataataaatacttttggtggcagggcaggggggatttaaaaattttaagccmaataaagatataaagctaacagaaaaaaaattttagaaaatactttcataacttccaagtgagaaggtatgtgtgtataaatatataccttaaatatgtatactctatgtatatttaaagaaaatgtataccaattctgtaaagaggtaaatgataattgcttgatttttttttttttttttttttttttttgagatagagtctcactctgtcgcccaggctagagtacagtggcgcgatctcagctcactgcaaactccgcctcccgggttcatgccattctcctgcctcagcttcccgagtagctgggactacaggtgcctgccacyrcgcccagctaattttttgtatttttagtagagacagggtttcatggtgttagccaggatgatctcgatctcctgacctcgagatcyrcctgcctcggcctcccaaagtgctgggattacaggcgtgagccaccgygcccagccaattgcttgatttttgataccatgccagatcattttccaagtccacttgcccgaatgtcacactcgtaagaaatgataagtatccatgtgggattggttctaggatccaccctcagttaccaaaatccacggatgcttaagtctcttatgtaaaattacatagtatttgcatatgacctactcacatcctcctacacactttaaatcatctctagattacttataatacataatacaatgtaaatgctatgtwaatagttgtaattctgtattgtttagggactagtgacaagaaaaaatagtctgtacatgttcagtacagaagcaatcttttttttttttttaagagacagggtcaggcgtgtatacaggcggcacatgttaataaactgtttcggccaggcacggtggatcatgcctgtaatcccagcactttgggaggccgaggtgggcagatcacgaggtcaggagattgagaccatcctgactaacacggtgaaaccccgtctctactaaaaatacaaaaaattagccgggtgtggtagcaagcgcctgtagtctcagttactgggaggctgaggcaggagaacggcgtgaacccgggaggcggagcttgcagtgagccgagatcgcaccactgcactccagcctgggccacagtgcgagactccatctgaaaaaaaaaaaaaaaaaaaaagacggggtctcagtctgttgcccaggctggagtgcagtggcacaatcatagctcactgcagcctcaaactcctgggctcaagcaatcctcccacctcagccttctgagtagctggaactccacaccactgtgctaggcctcttttttggtttggtttttggtttttttgagacagttttgctcttgttgcccaggcaggagtgcagtggcacaatctcggctcactgcaacctctgcctcccacgttcaagtgattcttctgcctcagcctcccaagtagctgggactacaggcgagtgccaccacgcccgactaatttttgtatttttagtagagacagggtttcaccatattggccaggctggtctcgaactcctgacctcgtgatccacccacctcggcctcccaaaatgctgggattacaggcgtgagccactgcaccccgccaattttttgtattttcagtagagacagggtttccccatgttggtcaggctggtctcgaactcccgacctcaggtgatctgcccgcctcagcctcccgaagtgctgggatcacaggcatgagccacckcgcctagcctgttttttgtttttttgagacagggtcttgctctgtcacccaggctggagtgcagttttgcagtggcatgatcccggctcactgcagccttaactgctcaggctcaagygaccctcccrccacaacctcccaagtagctgtgtcccacaggcacacaccacagtgcctaatttttttattttctgtagacatggagtctccccatgtactcaggctggtctcaatctcctgggctcaaatgatcctcccccatcttgttctcccaaagttctgggatcacaggcgtgagccaccgcccccaactrcttttttaaaaatattttgatctgcagttggttgaatcctcaaatgtaaaacccacaaatatgragagccgacaagaaccaacatctgacgaaggtacagaaaaactactgcactactgctctataagattagaaattaatctgtaaacattgatacattgttaggatgcttttgccacctgatagagacattaattccaaatgttccaggtctttattgycctgagaaagttaagcaatcttataactaatttagcaaatttgtgtaaggattttgcctttcaatatgaatgtatgttcaaagacaaaggtctggaaagatatgcacaaaataaaattaaacagtggttatttctggggaggaaagtaggaaattgaatttttgcaactttttgtacttttgtatttttcagaagttcttgtttttaaaatgtcaatgtaaaagcacacacacaataaatgtctccatsaactctttgtccacgactagagaaatggtttagtaaactatatttcttttccttggaaacatattcaatcattaaaattatgtttataaggattacattataacatgtaattaaagaaagggaaaactatgcacagaaaagttataggaggaaaaacaccagtgcattaattatattgataatattttatttttttaagtattcttatctaatgagaatgtaacatttttgtaataaggaaaatgttagtaaaaacaaaacacagcatgtttcagcatgccctgactcttctttgaggatatgtgatacaatagattggccttttgtgacttttacaaaaggttgtagtttttgttccctccacacttaagaattttatctcacatcatgaatatctgacttctggctttttttttttttttttttaaggtaagcaagctaacatttaaaactgtgattaaataagagtatctttcaaggtttggctaaggagagctaacatttccgtgctgtgctgttaatcaaaggaacttcttcagctggttttgttttgttttgttttgagacggagtttcgctcttgttgcccaggctggagtgcggtggcaggatctcagctcactgcaacctctgcctcctgggttcaggcgattctcctcctcctgggttcaggcgattctcctgcctcagcctcctgagtagctgggattacaggcatgcaccaccacaccgggctaatttctgtatttttagtagagacggggtttcaccatgttggtcaggctggttcctttttaactgaaacatgtcagagaggaaaaattttcctcaaccctcttatgttttgtaactgagggcctgcaaattaaactaataaaagacatagtaacaggagaaaaggcacaccatttttattaatatttgcatgcaaaagagttctcaggaaagaagtagttagacttgcggttttatgtacctttttaacaaaggaaagagggtttgagcttcaaggaactaattgtggggcactgagtaggaaacatgggggaattaatggaagataagggctattttagaaagatctgtttatgcaaattcatcttggtgttaattcccatctttggtaaaaatcactcttctctccctggtactgggtgggtggggaagcaccttcctcaatgggaaatttatgccctgcttttaggctctgtcacccaggctggagtgcagtgacatgatcatggctcacagcagcttcgacctccagggttcaagctatcctcccgccttagcctcttgtgtagctgggaccacaggctagcaccaccacactcagctaattaaaaaaaaaaattttggtggagatgttcccgaaccgaaccaggcctggctgtatgttctcacagcccaataatgagatgcagatggactgggaaagaagggagtttatttctgtaactggatacagggagaagatcagagattattcgccagaccaactcaaggtattacaattcttcccatgctcatacatgtttggactacatgcctacgtgcagtatcacatttgcctaagtttatcagtaattaattttgcttcaactagaaggtcagaggccaaaaatgccytctaaatctacctaatccgtgagggtcctcgtaccagggtgattaagaaatgtctcctaaatttacttaaggaggatcctggcaccagagcaattacttctactttatcttacctacggtttggtcctaagagttgctccagaccctcctccttaaaataaatcgtttcaaggactgtctatgttaccttgactcgccccagatgtcaacccgagacagatcctggtacaaggaatgtaaggctgtctccattatcttgacgtgctccaggttttaggagaagcctgtgcaaggcacttactgaacatatatttcatttctggttctgacgtccgagcattgattttccctagacttaattgttagcccaatattaaggcaagcgctgtggaaattcatctatgtaaatggagtgctatggagccctgtctgtgtgactgtcagggagaactggcctgccacagatatgaggtctcactatgttgcccaggttggtctcgagtttctgggctcaagtgatcctcctgccttggcctcccaaagtgctcggattacaaacatgagccaccgctcccagccacctgcatctcctgattctcaattaccttcagctcaaaattttcctatgacaatgtgtcatattttggggtcgcatattcagatccccttcaaacaaagatgaataaagtcaaaacacctatggggtaaaaattcctcattctgaaggcaccaggtaaagattatgctctttggagagacaagatagaaactgccattgcaaaattataactgagaaaattatgacagtaaaggagatctgagctaaccaactccatcttgcttcaagctatccaatttgactcctgggtgtacgtagaactaactcagggaggaactcaatttatagtttaactttccccaaacaaacttccttcctgcttggggactagactgcctttgtaggactaaaaaattcgccacgagatcagaaattatggtttaggagttatgcagctggaggctacaagattctgactgtcctcaaatttctcctggggataacattactattgtaaaacataagattagtgcttgagacattttgcagaccgtacacttgatggatcagctggcactaccyagcttggtaaactggctcatctaatcttgtagcccccgcccaggacctgactcaagcaaaaggacagctttgactccctgtgatttcatctctgacccaaccaatcagcacttgcaacccactggcttccccacccaccaatttatccttaaaaactctgatcaccacgaggtcagaagtttgagaccagcctggccaatgtggtgaaactccatctctactaaaaatacaaaaatcagccatgcatggtggagcacacctgtagtcccagctactcaggaggctgagtcagaagaattgcttgaacctgggaggcagagattgcagtgagccgagatcgtgccactgcacttcagcctgggcaacaaagtgagactccatctcaaaaaaaaaataaaaaataaaaaacaaaactctgatcaccaaatactcgaatgcttggggagactgatttgagtaataataaaactctgatttcccacacagccaggtcttcatgaataattctttctcaggctgggcgccatggctcatgcctataatcccagcactttgggaggctgacacaggtggatcgcttgagcttaggagcctgggcaacatggcgaaaccctgtctctactgaaaacacaaaaattagtggggtgtggtggtgtgcacctgtggtcccagctacttgggaggcttatatgagaggatcacttgaacctgggagatggaggttgcaatgagttgagatcatgccactgcactccagcctgggcgacagagtgagactgtcgaggcagcgagcaaggtgaacccactgggtggttacaagatggcacagagtttataagtagaaattctcttgactgcacagctttccatagtctagcaatgtgcccttgggaaaatgtattcatctcttygagctcaatgtcttcacctgtacaatggtgttctggtgaagatcaagtgagataaggcacacttagcaaaatgcctggcacatggcacaaaattttgtattcctcttcagatgtttatttcataagtrtatggamtcctactatcagtcagtttgaccagagaaacataaacactatgagtaacagagtatggtttacgatagagattatgaggatttatcatagggattagagtatagacagttgtgggagctgttggagaggtctacacaaggctgtcgccttgggttgtgggttgtgtagggtctgaagtcacccaggctggcagtcaggaaggctgaatgtaaagtagggaagagcaagacttgggatccatatggatagactagaaatcacaaggacaagcaatgacattgggcgacctgcaggagaagctgttgccctctgccacagaaccacccaatcacctggcccaggtctaagaaaagctgaaggaggagatatggtaggagcttgaggggccgtggataccaccgtgtagggaaaactctccctaactgtgtttttcccctactctcacacctcaacaatcaacacagaagacttctgtggccatgtgttgtgtggtttttttttctcacataccaagctgtgaagagcatgtgggtaccctctaattctgatgctatctacccagagatagtgtcagatgctacaggttgagggctcagtacccaagactgccccctcacacaaaccaatcacaagcctgcgcctctggaacttctgactggcttcaagttgaggttcccatgaccccctctttgggttcaattaatttgctggagtggctcacagaactcagggaaacacttactgatgtttacctgtttattatagaggatattgcaaaggatatagatgaagagatgtgtagggtgaggtttgggggaaggggcatagagcttccacaccctccctaggtgcaccatcctccaggaatgtccgcgtgtttgctatacagaagctccctgaatccagtcctcttggattttttgttcrtttgttttgttttgttttgttgagatggagtctcactctgtcgcccaggctggagtgcagtggcatgatctcggcttgctgcagccttcgtctccggggttcaagtgattctcctgcctcagcctctcaagtacctgggattacaggcacgcaccatgacatccggctaatttttgtatttttagtagagacagggtctcaccatgttggccaggctggtctcgaactcctgacctcaaatgatccgcctgcctcggcctcccaaagtgctgggattacaggcatgagccactgagcccggaccctcttgggtttttatggaagcttcatgatgtcagcatttcttcccccagggtgtacaagggtcttaagacccacaatcagaaaggagggaaacattagtgtcctgccttgaggcaggtgaaaggagggcaagagaagctcaaaggcccgcctccgaggtctgacacaccccatattacaacaagactgtaccaaggcagggaccatggatgaaaaccaatatacatcataatgccaccctgccccaccccagcaaggccagctagggaatcagcaacaataacgcctcactgcaataacgcctgccactatagccttactttcagcacaaagaaaatggcagatgcttcacttgtggcttctaaaacttgttcatgtttcttctgtggtcaactgcaactcagaatcattcagggaaggaagctgggacacttagtttgaatttatcyaagtcgacagagtacaaagccatcacacttttgtattacttataaccctggctactttagtctgaaactaaaaacttggaggcaaaaaacacacagcataacattcagactttttaagcccaagacttttattttgaaattcggggacttcttttttttttttttttgagacggagtttcgctctgtcgccatctcggctcactgcaagctctgcctcccgggttcacgccattctcctgcctcagcctcccgagtagctgggaccacacgcgcccgccaccacgcctggctaattttttgtattttttcagtagagacagggtttcgccgtgttagccaggatggcctcgatctcctcatctcgtgatctgcctgcctcagcctccgaaagtgctgggattacagacgtgagccaccacacccggcccgaaattcggggacttctaacagcaaagccagttaccttctcatttctgtgagatgaattcatagtgaaggagtgaaggatgtgccactccaaaatctgctgaattagtatactgattatttaagctaaagacactttagaaactgtagttgcagaaagggcgagctagccaggcatggtggcacacgcctgtgccacagctactccgaaggttgaggtggaaggatcacttgagcccaggagtttgaggttgcagtgagccgtgatcgtgccactgcactccagccttggcaaaagagtgagacactgtcaagaagaaaggaaagaaagggccaggtgcggtgggtcatgcctctattcctagcactttgggaggccaaggcgggtggatcgtttttgagctcaggagttcaagaccagcctgggcaacacagtgaaaccccatctctacaaaaaatacaaaaattagctgggtgtggcggcatgcactgtggtcccagctactcgggaggctgaggtgggaggattgcttgaacccgggaggcagggagacacaggttccagtgagtcaagaccatgccatgctgctgcactccagcctgggagacacagcaagaccctgactcaaaaaaaaaaaaaaaagaaaaaaaaaagaaaaagaaaagaaagtgagagagaaagaaaaaaagaaagaggtagctgacctgtccttttctacctgttacaatccataaaaattcctttgaggagaatgcttctttgtaccagggtgagaaaacaacccctatctccagagactgggaactgatgctccaacaggcctgtataaataaacttactaaactaacccttatcttccactagctttacacctctccataaatctcctagtgactgccctagaatttactactccggcccagatccctttgtcttgtcatttcttcacaaatttatcattctttatctgaaaagtaaaaaatcttcctacttttgtcatttctttgagtcttcactctcttgtgagggtccccatgtacatgcaaaaattaataaaacatgtatgctcttctctttttgatgtcttgtgtcaatttgatttctggaccctacttaagaaagtcctacttaagaactaagatgagtagaggtgacttttaggccctcctacaatagttcagaaaacaacaagtatggtggtggtgctggtagtcctagctacttgggatgctgaggtgaggaatcacttgagcccgggagtttgaggttgcaggggagctatgattgcaccactgcacttcagcctgggcaacagagcaagaccctgactcttaaatttaaaaaaaaatttgtttgcttcaaaagatgtaattttgaatgaattatatatcgcactaaatagaaatttgttcagataaaaactatcaaactcttgtgcagatttggcctgagggatggcgggatctgagcaaatctcagtgggttgtgacagcgtgtgtggcttgatagtttccytgtttgattctcacatagtgcccmcccacagacagcttttttttttttaaagatggagtttcgctcttgtcaccctgctgggttcaagcgattctcctgcctcagcctctgagtagctgggattataggcacccgccaccacacccagctaatttttgtatttttagtagagacggggtttcaccatgttggccaagctggtctcgaactccagacctcaggtgatctgcccacctctgccttacaaagtgctgggattataggcatgagccactgtgctgtgcccagccaatttttgtatttttagtagagacagggtttcaccatgttggccaggatggtctcgatcttctaacctcgtgatccacccacctcagcctcccaaagtgctgggattacaggcgtgagccactgtgcccagacagcagagtagtttcttgatggccaggggtgctgtcttaatttggaactggctggaaaccctgttgctgatcatctgaagcttgatggtctctaggcgagagaaaatgaatttggttaaaagatttaatgggaatttcaggggtggatacctatgctgtcagggatattataggaatgaattaaaacattctgttggccgggcgcagtgtctcacacctgtaattctagcactttgggaggcagaggcgggtggatcatgaggtcaggagatctagaccatcctggctaacccggtgaaaccctgtctctactaaaaatacaaaaaattagccagggttggtggtgggygcctgtagtcccagctactcaggaggctgggcgtgaacccaggaggcagagcttgcagtgagccaagatcacaccactgcactccagcctcggcgacagtgcgagactccatctcaaaaacaaaacaamacaaaacaaaaacaacgttctgtttaggccgggcgtggtggctcacgcctgtaatcccaccactttgggaggccgaggcaggcgatcacaaggtcaagagatcaagaccatcctggccaacatggtgaaaccctgtctctactaaaaatacaaaaattakctggacgtggtggtgcgtgcctgtagtcccaggtactcagaggctgaggcagaagaatcacttgaacccgggaggcggaggttgcaatgagtggagatcacgtctctgtgctccagcctggtgacagagcaagactccttctcaaaaaaaaaaaattgtttaattactacaaaggaagtgattccaaccgtttgaaagatggaaatcaatctgcaaaaaatataaaaacatggctactgttatccagcctacagtaacgatgcaacaaaacaccaaggaaaattggtaggcttcttcttctcttttggctgccttctaaacaggtacttcagggcttccacaggttcacagtgtagtggatgatgggaacttcaggttccaggtctggggcttcaggtatcgcagacttgatccttgaaagatgtattgaacgatctaatcccagtcctttgaccacagaaggtgtggccattaccactgaaaatggtcctttccatttgggttgcaattgttgagcaggtgatccctccttgcatgttttaacaagtaccttatcctgacttgattttgggttactggttagttcccagtatagggagcctttgagttccaaacttttgtaaagcctgctgaaattgacctaggttagctaggtattttactaaactggctgtttctgaatcagtaattagatcattagtgaagaatgcccttccgtataacatttcctatgagcttatattaatttctgctctaggggtattacaggtccttaagaaggctatgggcagtaggctgaccaaagtttctaatgtttcctgacatagcttagataacactcattttagagtttgrttagccctttctactttcctggaggattgaggccttcatgctgaatgtaaatagtatttgattctatgatggctaatattgagtgtcaacttgattgaaggatgcaaagcattgttccttggtgttatctgtgacaatgttgccaaaggagattaacattccagtcaatgaactgggaaaggcagacccaccctcaatctgggtaggcacaatctaatcagctgccagtgcagccagaataaaagcaggcagaagaatgtggagggattagactggcttagcctcccagcctacatctttctaccatgctggatgcttcctgcccttgaacatcagactccaagttcttcagctttgagactcagactggctgccttgcttctcaacttgcagacggcctattgtgggacctcaccttgtgattgtgtgagtcaatactccttaataaactcccctttatatatacatctatcctattagttctgttcctctagagaaccttgactaatacagattttgagagccttagcaacactgtgagttatttgggagataaaggtcaggccattatcactttagagactctgaggtaacctaaacttagggattatttctttttaagagaaactttaggctgggcgaggtggctcacgcctataatcctagcactttgggaggctgagkggggcagatcacctgaggtaaggagttgagagcagcctgaccaacatggagaaaccctgtctctactaaaaaatataaaattagccaggcatggtggctygtgcctgtaatcccatcactttgggaggccgaggcaggcaggtcaccagatgtcagaagattgagaccaatttggccaacatggtgaaaccsmatctctactaaaaaaatacaaaaattmgctgggtgtggtgacacacacctataatcccagctactcgggcagctgaggcaggagaatggcttgaacccgggaggtggagattgcagtcagctaagatcacgccactgcacttcggcctggcaacaaagcgagactccatctaaaaaaaaaaaaacttttatcctctacaagctggcacatgggtgaagtctaattgccagtcttcccctggctaagttcctctcctctggactagttctattaggggaggcattttgtgtcccgggttattaagtgcacccagtgagcagacttgacagacctgctaagttaggcccaatgaagagcctgttaaccatggccagggtggcatctctccccatatggaaggagtcaagcagggtttttacaattctccattgggctgtttgagggagatatgcttttgatcccatataccaccaggatccttgtttttgtcccccsctccgttattaactctacagtgtgtattcaggttctattgggaaatcatagaaaggaagtagtgctaggatctgttgggattgcaccctgaggscttcagcttttgcttctctatcagcctttctgttcctttgtgccataggagttaagttcctttgatgccccccacaatggattatagctacggcctttggcaggtgtattgttgctaataactgaataatttcaagcccatgctttataggacagtgtttgctagttagtagtagtcctctttctttccagattgtagcacgagcatgaaccacaaagaatgcatatttagaatctgtatagatgttaaggtttttcctttgtcccagcattaatgctccagtaagagcaatgatttcagccttttgtgctgatgtgccagggggcagtggctgggcttcaataatggtgttgtgatttactattacatatccagctctgcactccccatttgacacaaaactactgccatctatgaaccagtcaccctcagaatctggaagaggctgatttttttttttttaagacggagtctcgctctgttgccaggcttgagtgcagkggcatgatcttggctcactgcaacctccaactccctggttcaagcgattctcctgcctcagcctcccgagtagctgggattacaggcacccaccaccatgcccagctcacttttgtatttttagtagagatggggtttcaccatgttgtccaggctggtctcgaactcctgacctcaggtgatccacccacctctacctcccaaagtgctgggattacagatgtgagccactgtgcctggctgtgtccctttatctctaagactgactttacctgattgggggttagaacttccagcagttggcccaggttgattttagtggcttcctccactaacatagcagtggctgctattgcccgcaggcaacttggccatcaggaggccactccattcaacttctttgaaaagtgggcagttggggccaggcatggtggctcacgcctgtaatcccagcactttgggaggcagaagtgggcagatcacaaagtcaggagttcaagaccagcctggccaacatagtgaaattctgtctctactaaaaatacaaaaaaaatagccaggcgaggtggtgggcgcctgtaatcctagctaytcaggaggctgaggcaggagaattgcttgaatctgggaggtggaggttgcagtgagctgagattgtgccactgcacaccggcccctgcaacagtgtgagactccgtctcagaaaaagaaaaagaaaaagaaaaagaaaagaaaagaagyaggtggttggtctgggttctgatcctaatttctgggctagtactcccatagctatggccctcttctctgctacatacaaggagaagggcttagttagctctgggatgccaagagygagagcctgggtaagggcctgttttagcttggcaaaggcttctctcatttctggggcccattccattagctcattttcaggcccccttgttgcttcatatagaggctttgctatgagcccaaaatttggtacccatattctgcaaaacccagccattccccaaaaagaatgaagctgctgcttggtgttggaggcagggctcaaaccacatatggtcygtgctcattctggggatatttgccaggctccgggtgttaagacatatccaaaatattggaaccattggagggtaatctgagccatctttgtatcccgtattccaggaaattcaaagtttgtatagtattttggtcagaagccacccaggttggctacgcacaagaaggtcatccacatactagagtatactcccattctccaattgcagatccctcagatccctctctaagactcaggcaaagaaatgggggctatcccggaagccctgagggagcaccatccaagtgtattatttttctctggtactaggattttcccattcaaaagcaaaaaacctattgggactctgggggcagaggaatggagaagaaagcatcttttaggtctaggactgagaactattttgcatcccctggcacctgagccaagagggtatatatggatccaccaccaatggatggccagggataatggcctcattaattattctgagatcctgtgctagctggtattccctcaaagcctttagaacaggtaagatggggatgttgcaaggagaattgaagggttttcagagcccatgggtaagtaatatctcagctctggatagctcaactattttaactatgaagccttttcttgcttccagcttaaytggtttcttatttttgtttttgtttttgagacagagtctcactctgttgcccaagctggagtgcagtggcacaatctcggcttactgcaaccttcacctcctgggttcaagcaattcttgtgcctcagcctcctgagtagccgggattacaggcatgtgccaccatgcccagctaatttttgtatttttagtacagatggggttttacyatgttggccaggctggtctcaaactcctgacctcaggtgatccacttacctcggcctcccaaagtgctgggattacaggcatgagactccatgcctggctgggtatttttttgtagttgttgttgttgttttgagacagagtctcactctgtcaccaggctggaatgcagtggcgtaatctcggctcactgcaacctccgcctcctcggctcaagtgattctcctgcctcagcctcttgagtagctgggactacaggtgtgcaccaccacacccagctaagttttktgtttttagtacagatggggtttcaccatgttggccaggatggtctcgatctcttgacctcttgatccacccacctccgcctcccaaagtgctkagattacagccataagccactgcgcccagccctggcttggtattattttcaattgggaaaatagctggggtctttaagctgtgttttgactggmacttttgttttagccttccccggtttcccagtataccatgctagcaggttagcctgtttattaatgtggtctgggacattgtatttttgactattagcaatttcactgggtgatgcttaaattgtagtagtgcccctattttaaccataatatctcttcccaacaggaggactgggcagcttggtactactagaaattcctgttggaaaaattgtttctcaaattgacaaatcaaaggaggagtgaagaagcttgtttgtggccttccttccattcccataacactcattgactgggaggaaggttttcctgcacaagcagtaaggacagactaatttgctcctgtatcaaaaagaaactgaatttgggggcccatcacagccagagttacccggggctcctcatctaattcctccttttgtactgctagagctttgactgactgagcccctcagtgggaactggggcagtcaatcctccagtgccaggggtcataaccagtaccctcacgtttttggcaagggcctggcatatgcttagtacaattctttgcacaatgcccagctttcttgcatttgaagcaagagcccttgctggcattatccttatggctcttctggtttcctttggacactctttgggcattcacagcatcgccaatgatggcttccataattttggcttgccatttttcttttcttttcttttttttttttttttgagacagagtttcacttttcttgcccaggctggagtgcaatggcacaatcttggctcaccgcaacctccgcctcctgggttcaagtgattctcctgcctcagtctcctgagtagctgagattacaggcatgtgccagcaggcttagctaattttgtatttttagtagagacggggttactccatgtcggtcaggctggtcttgaactcccaacctcaggtgatccgcctgcctcggcctcccaaagtgctggaattacgggtgtgatccactgtgcccagcctgcttgccgttttattttgctccctttttccttccaccaggtcacgattgttataaaccataaaggtggtatcaagaagctgattttgattagtttgtggccccatctgtagtttttggagcttatgtctaacggctggggcagattggctaatgaaatgctgtgccattcctattttgcctttgggagaagaagggtccagattagtgtatttgttaaaagcttcctccagcctgccatgaaacatggctgaattttcctcctttccctgtgtaacctcccttactttatcataatttactgctttagttattccctttctcattcctccaaggagagcctaaagaaatttagcccagttgttcattcccatgggtgtgttatagtcccagttaggatcagtagtagggactgtgtctggtcctgggtgattgccctgagggtttcgggcaaataaattrtctgcttcctggcgggcagcctcaaggatgtgttccttttcaaaggaggtgtaacagattgctagaatgaattgagcgtccctccatgagagatcaaaggctaaggtcaaagtctggagcccatctatgaatttcctgggattctcagaacagcttcctcactttcccttatgttattgtatattagttatagagaaggggacctgcactaggactggccccttggcttctgctacttcctaaggggtagcagggctggagggagagttgaatgtgctgttcccctccgagtgtgagggggactgagtagggtccccagtgtttgggttttagcctcaggaacacttggcaagcggctatatggaggcagttgctgttcaccctgagagacaggtggcccttgtaaaagggggtcatctataatatctagttctgcctttggacttccctgtgggggaattattaggttttggtatagggccatgaaggcctatacatatgggatttctgaccatttgccctgccttttaaaaaayaggtctaattgcaggatggtgtcataattaaggctactattgaccacccattgttccaggctggrsagcttataatggggacaaacagtattggagaaacaaaaatcatacgttttctctttagattgtcagggtcaaattgatttcaatcccagaggatgcagccaagtggggaatcaggtggaattgatggagagttgcccatagtggtctagaaaagagaagagaactttgaaaagttgagggctcattaagtaaccgaaattttagctggggtatccccctggaaaaattctggcccctgattggggttcccagggggcatacccttaagggccccatcttagcctgtcagatgtcgctaaactcacatgggtgctagcaccactttggaatggttccctccaccactgatggcccactatgagctttccctcttgtccctggatgaaggccttgacttctagaattaatttgtagtcaaacctttggattttttttcctatcccacttaaaacaattatttaactctctacatttaggcaagattaaattgtatataaattccctcttatkaatccacccccatgactcacacagaccatctacaacatgcccaagccctctgacttgtccttagccagtcgagtagggaaggaaagaattcagcataaggaaagaaggtttaagtcacctgaaacmtgtatgagttagccccgggtgagcttccactgccaattacgtcacacatagggatcagggactataaccagaaaagatagaaaagagtccttccccgttccaggcaaggcagccatccccattcactccttggccttcaggtwacaccagagactggccccagccagttgccttcaattaccaacagtctactagaaaatggccgctgaaagaccgaaaaagtaaaggacttggtctcaagccagttggtggcggtcaggcgcttccacatggaaacctttcagtttcactggagagtggccctggccagaaacatgctgttgcctccatgcttaggcgctgtccaccaaggatcccaaattggaaaggaagagagaaagagaaagaggaaaaagagaaaaataaatcccaaactttgggcttacctcctggctggctcaccaaaatatgttaccagttgagggtagctgtcccagttcttggcattttaaacaaagaattggacaaacacacaaagcaagacagtgaaagcagagatttattttaaatgaaagtacactccccagggttggagccatctccagcaagtggttcacagtatcggttacagaattttctggggtttaaataccctctagaggtttcccgttggttctatgcaaataaagtagtggccaagaaccagtctgataggatgcgggaggggaccaatcagaagtaccttcacgtttcctttttttttttttttttttttttgagagggagttttgctcttgttgcccaggctggagtgcaatggtgacatcttagctcactgcaacatccacctcccaggttcaagccattctcctgcctcagcctcctgagtagctgggattacaggcatgcaccaccatgcccggctaattttgcctttttagtagagacggggtttctccatgttggtcaggctggtctcaaactcccaacctcaggtgatccgycagcttcagcctcccaaagtgttgggattacaggtgtgagccaccgcacctggctgtaccttcatttttcaactgccatgcaraaaaaggaggggttgtaaagggagtagtctctgatatccagtcagcaatcggccttaggttccctgcctctagaccctattttcctgcctcaaatctagaggcagaaaagtggtgttttcattcaagaatgagggctgagctgggcacagtggcttttgcctgtagtcccagctatgcaggaggctgagatggaaggtttgctgagcccaggagttcaagaccagcctgggcaacatagcaaggctccatctctaaaaagtaaaagaacaataaggtctgaatggcatgacaatgaggttaagtgaagctactaagattaartcttcagtggctttagttaactttgcagctgtaagtacccaaagagggtaggcaactgctacggggccaaatgagaagatgtaacaagaaacgggtctttgatgtccatcatgctgttaacacctctaaaatttctcctgattttttatacacaaatagaaagtagagtttataacaattagggaattcaagggtagtgagtttatttgggacaagaactcaggtgtgtcaactagttttgattatagaaagggggagccagtatagacaaattcagaatccagtgtctacaatatcaygagtccaagaaattctctaaattatgttctggtaattggccaggtaaaatcataaagagcttcctttctctgaaggaaaagagattttcccttttgcatgatgatgtcatgatcaagataattcactttagtctgataaaactggatttatggccgggcacagtggctcacacctgtaatcccagcacctcgggaggtcgaggtgggtagatcacgaggtcaggagttcaagaccagcctggccaagacggtgaaaccccatctctactaaaaatacaaaaattagccaggcgcagtcacaggcgactataatcccagctacttgggaggctgaggcaggagaatcacttgagcccgggaagcggaggttgcagtgagccaagatcatgccactgcactccagcctgggcgacagagtgagaatccatctcaaaaacaaaacaaaacaaaactggatttatcctttgagaagttatgtccctaattcttcaagatttggccgggcaccgtggctcacacctgtaatccctgcactttgggtggctgaggcaggacagcttgagcccaggagtttgagaccagattgggcaacatggtgtaatcctgtctcttaaaaatatatatataaaataaaaattcttcaagatcttctatctggagagcataagagaagatccattaattatataagagtttcatcatctctgaattctgtaaggagataaactcatggatagagattacagtatccatcctataaattcttttttctttttttgagatggagtcttgctctgtcgcccaggctggagtgcagtggcatgatcttggctcactgcaacctccgcctcccgggttcaagcgattcttctgcctcagcctcctgagtagctgagactacaggcatgtgccaccacgccctgctaatttttgtatttttaatagagatggggtttcaccatattggccaggctagtcttgaactcctgaccccgtgatccacccattttggcctcccaaagtgctgggattacaggcgtgagccactgcaccaggcctccatcctataaattcttaaaataatcctaaatccttcaatgaatttttctctttacgtaggaggatttagaaggttcttaactagattatgcaaacctgaaattgaccaaggtttaaaacaataagcttagctaagttggttgtcatcatcacttaggtgtaaggcatcacgaagggatactgtccagtgaaaggggggtgtttaggaaggagtaatggaggaaagcgaagaggacctaaggaagacacagcaggaagggaatgagtcaaagaaaggtgttatgggaagtcagggaccccgaacagagggacctgctggagccgtggcagaggaacataaattgtgaagatttcatcttaatatggacatttatcagttctgaaataatacttttataatttcttatgcctgtctttactttaatctcttaatcctgttatcttcgtaagctgaggatatacgtcacctgaggaccactgtgacaattgtgttaactgtagaaattgattgtaaaacgtgtttgaacaatatgaaatcagtgcaccttgaaaaagaacagaataatagcgatttttatggaacaagggaagacaaccataaagtctgactgcctgcggggttgggcaaaaagagtcatatttttcttgttgcagagggcctataaacggacatgcaagtaggaaacatatcgctaaattcttttcctaacaaggaatattaatattaataccctgggaaaagaatgcatccctggggggaggtctatgaacggccactctgggaatgtctgtcttgtgcagttgagataaggactgagataagccctcctctcctgcagaatccttaggcttactagggttgggaaaactcagcgctagtaaatttgtggtcagactggttctttgctctcaaaccctattttctgttgtttaagatgtttcatcactctcagctttcacctcagaggaggccaaggtgcaactttctttagtcatcccaaatccaggttcatctgacaccagccgcctccaccatgccaccgaagttcaaccctaatgagatcaaagtcgtatacctgaggtgcaccggaggtgaagtcagtgccacttctgcactggcccccaagatcggccccctggtctgtctccaaaaaaggttggtgatgacattgccaaggaaacaggtgactagaagggcctgaggattacagtsaacctgaccattcagaacagacagacccagattgaggtggtggcttctgcctctgccctgatcatcaaagccctcaaggaagcaccaagagacagaaattaatagaaaaacattaaacacagtaggaatataacttttgatgagatcgtcaacattgcttgacagatgcggcactgatccttagccagagaactctctggaaccattaaagagatcctggggacygcccagtctgtgggctgtaatgttgatggccactaccctcatgacatcatagatgacatcaacagtggtgctgtggaatgcccagccagttaagcacaaaggaaaatatttcaataaagaatcatttgacaactagaaaaaaaaaaaaaagatgtttatcaagacaatatgtgcaccgctgaacataggctcttatcagtggttctacttttgccctttgccctgtgatcgttgttggaccctaatcagtggttctgcttttgccctttgccctgttccctcagaagcatgtgatctttgttagactcttatcagcggttctgctttttgctctttgaaacatgtgatctttgtacctactctctgttcttacaccctctccccttttgaaacccttaataaaaacttgctggtctgagactcaggcaggcatcacagtcctactgatatgtgatgtcacccctggcagcccagctataaaattcctctctytgtactgtctctctttatttctcagccagccaacacttatgcaaaatagaaagaacctacattgaaatattgggggtgggctcccccaatagaaaggcaggaggaagttgagggccaggggtctaggatgtaagttaatcccgggttaggcaagagatggagaagagatttaaacgttggcttttaggtcctctatatttttattggccttttctaataagtccttaatagaagctattttagaattttcctttgagaggactcttcctggtcatttaaaaacgctaattattgaatatctgggaacatttaaccattgactgtaaggtgccaaaaacagattatcttattcacatccaaagttcaccagaacagccactaaagttctagaatgtccttagtaagattctgccataggatccaatatttaattctatttaccgcacaacattgagctcatattcaaataaaaagaacaaagaagaaataaatacacaggccccaaaawtctcttggaactatgagcccaggtcatctgtgagaaccttgagtagtaaaaacaaatcatatccagaggcttataccaaagacaataaaggtaacgaaggcttaagtggggctgggcatagtggcccacacctgtaatcccagcactttgggagggccgatcacctgaggccaggagttcaagaccagcctgaccaatatggtgagaccctgtctctactaaaaatgcaacaattagccaggcgtggttgcccggacctgtagtcccagctactcaggaggctgaggcaggagaatggcttgaacccgggaggtggaggctgcagtgagctgagactgtgccagtkcactccagcctgggcaacagagtcagactcagtctcaaaaaaaaaaaaaaaggctyaagtaggcacagtagctcacacctgtaatcatggcacttttagaggctgaggtgggtggatcacttaagcccagaagttcaagaacaatctgggcaacatggtaaaaccacatctctacaaaaaaatacaaaaattagccaggcgtgctagcacacacctgtggtcccagctaccctggagggtgaggtgggaggatctcttgggcctgggaggttgaggcggcagtgagccgtaattttaccactgcactccagcctggcaacagagtgagaactcatctcaataaaaaagaaaaaaaaaaggctgaggtgatgattcaaagttgtgagacggttggaagcagggctcattcagctgagcagtccctgtgacttgtaaaggagaaataaaaacatcttaggacccccaaacttgttatgcagcagtgctgggtcatgcagcactgctatccttttcccaaatagacagctattactttacaacctggtgtcaaagcatcatacattacccagaccctcacagaaaggcagaaggtctgataccatctccacatgatggccctcataaatttttcccaactaaactctttgctggcctcaaaacctttcaagatgtacatcctcccataaaacaagaaccatgtccattttaactttaggtctaccatctaagtctagctcctaaaactaaagtttgctagagtcacactgataatgtcaattacaagctgatcttcccaggagcagaacaaatcattcctccacctaccstgagatgtttgcataattgattcttcctctactccctttttctctgaattctttataatataatcaccttatctgtataaaatgtagatttactgagctctaattaattaatagttccacaaaagtataaccatttgcctcaccaccctaccccctccttcccacatgccttctcccctttaaagaaatgtataaatactgtattagtccgttttcmcactgctataaagaactgcctgagactgggtaatttacaaagagattgaattgactcatagttccacatggctggggaggcctcaggaaacttacaatcacgacagaagaaggggaagcaagctaccttcttcaaaaggtggcaggaagaagtgctgagcaaagggggaagagtcccttataaaaccatcrcatctcaagataactcactcaatatcacgagaacagcatgggggaaaccacccccataatccaattacctccacctggtctctctcttgacacatggggattatagggattataattcaagatgagatttgggtggggaaacagagcctaaccacattttacatatttgattttttaaaatatttgataactttcattttgaattaatttcctttgtaatctcacatattttattttatgcattcaaaagattattctggccaggcatggtggctcatgcctgtaatcccagcactttaggagaccgagacrggtggatcacttgaggtcaggagtttctgaccagcctggccaacatggtgaaaccctgtctgtaattagccgggcttggtggcccatgcctataatcccaactactcagggaggctgaggcatgagaatctcttgaacctggaaggcaggggttgtcgctgagatcgtgccactgcattccagcctgggygacagagcaagaatccgtcttaaaaaaaaaaaaaaaaaaaaraaaaaagattctaagaaggtgtccatgggctctaccaaactaccaaagaggtttatggtcaaaaaaacagagaagagttcctgccctcaggagttatttctttttttttttttgcatggttgaaattaagttactgccatttctacattccaatccaagcaaatgtaagaagagtttcacggtaagccattcccttaggcagaagttgcatataacatttctgcttatatgtcattatgagaactgaaacttgacaacatctagctgcaagagagacttgggggaatataatctctacttacattccaagtgactacatacaaactgactttgtacccagctaaccattactaacawgaaggggaaagaaacaaaaaagaaggggaggcctggcgtggtggctcatgcctgtaatcccagaactttgggaggctgaggcaagcagatcacttgaggtcaggaattctagaccagcctggacaacatggtgaaaccccatctctacwaaaaatacaaaattggccaggtgtagtggtgcggtcctgtaatccctgctacttgggaggctgaggcaggacaatcgcttaaagcagggaggcggaggttgtagtgagccaagatcatgccactgcattccagcctagatgacagagtgagggtctatctcaaaaaaaaaggaagaacgggaaacagattatagggagcaatcaagaaaagaaaaagaactaatgacctcatttacaacttaaatgaataggcatttttttttgcaaaccaaaataacttttactatagatatgttaatgatgtcattaaaacattttctaaaacatattttataagtttaagagttaacaagccttggccagtttcggtggctcacgcctgtaatcccagcactgtgggaggccaaggcaggtggatcacaaggtcagcagttcaagacaagcctggccaagatggtgaaaccccatctctactaaaaatacaaaaaattcaccgggcctggtggcgggtgcctgtaatcccagctactcgggaggctgaggcagagaattgcttaaacctgggagatggaggttgcagtgagccgagattttgccactgcactccagcctgggcgacagagcaagactccgtctcaaaaaaaaaaagacttaacaagccttaaggctaagtactatgctcatgaaagactcagatagcatctaagagagcctttgtttttgaatgctgggaaacatagggagaggatcccgtaatttatgaaagggagcatagtatggagcaatctaatctatgaggggaatctttcccaagcctgaccagttgacaaggctttctggcacactaggttgtaaatctcttagagagaagacagtgtaaagcttggctctygagtaaacaaactttcaggtccatgagattgcattctccctttgcaagtttcttactggtgaccatttaagactactctattgatgaatatcacttgtactttaagactgtgcaaagatcaaacacttttggaaaaatcagacaacctttacttacctagcagagagaggataaaatcagcacaagtacagacaaggatacatggcagagagatcagctactttatcccaaatgcttcccagacattaaatcctaacggacactaagccctccttaggctgtataggagtggggtccctatcagaatttccggcaacaaaagtccctctccttgggtttgtttttacttgctgacctgcgtggctaggtgctagaaaatcccttatctgagccaagtgtgtccagctatgttccaggaactgctcctagtgaggtatatgtactaattcatgtaactatctcaaaaattaaataaggtaagtattattgttatccccatttttcagaagagcgaaaaaacaaaaaaatgaagtgattttcccacaaagttctatcactagggagctgcaaaacaagattcaaaccttggggcatacttaagagcactgaacaggtttgagccaaagagccattagagggccagagccgggtcctgaaccaacaatagacggagatgtgctagacacactggaggtgctggggtataagggaccattgctagaggagcaagcccttatgaaggcagcagagtggactatatgtaggagcatatayggtataggattatatatataggcttttatacaggaagaaggtggtatatactgtaaaggaatagatatataaactatataaattcctatacaggatatggttaggctttcaaataaaatcattatgcaacttggaagaaagtatgacttctgctggaagagatgatctagagagcttccagcttgaggtaaatgatttttttaaaagaaatggcatgtccatattctgtactcatatcaggagatactaaagatcattttaaaaaaggaggactggctgggtacaatggctcacacctgttatcccagcactttgggagaccaaggtggacagattgcttgagtcccaggagttcaaggccagcctgggcaacatggtgaaccccatctctacaaaaaatacaaaaatcagctgggtgtagtggtgcatgcatgttgttccaactacttgggggcctgaggtggaagaattgcttaagtcaaggaggtcaagcccacagtgagctgagatcgcgccactgtaaataaaaaaatataaaaaggactgtttgaaactcctattatttttaagtacagaacttgaagcttcacagatattacagaacaagaaacattaaaattctcaattagataaaaataatgaaatttatcaggaagttcaagttctgtgtgataaccttggtgtacccaagtaaacaacttctgacattctggttatgctaaaccaagtggaatcaaaggtgaaagacaggcaggacgcagtggctcatgcctataatcccagcactttgtgaggcagagatgggaggatctcttgagcccaggagttggagaccaatttgggtgacatagcaagatcccatcttatttcaaatttttaaaaattgttaatttttttattaaaattaaagaaaaccactctgctgaaaattaatttaaatttgaaacaggcagaacaactggaaagagtcaatgatgctctttcctgtgaacatgagtgcctctagcgaatgttatgaaacaattagatgcggcaatacagtccgttgcacggtgtgatacagccaaggtaagaaaagatgacacagcaagaatttaccagcctcagtgttatgctttgtcacccaagacagcgattataatggtgcatctacttgctgctcatgataatctatccaagatcattaggacaagcagtggagccagccagatgatggcatgtgccattaataaggtgctgatgggaagggtgcctgacaggggaggctggccaaatgaaattgaaccaccaccctctgaaatgcccccttggcaaaagagacaagaaggcagtggcggaaggggtggttggggtggtggttgtggaggtagaggtggtagtagaagaggctgtgggggtggaggtggaagagttggctggggtagaggaggatgggaaagtggtgggggagagggaggaggtgggatggaggtggtaaaggaggtttctaaggcagaggagatgatggtgggaggggagattatggtggaaaagattatgtagatccatatggaggaggtggtgatggtggtggatataggagatactgaagactacaaaaattaaaaaccaaaaccaacaaacctcaagcgcaaaggaatagtctgccctcttatgtcacaagcactaactaaccacctctgccctttctcatcccttaatcattcagacaagatttccttgtttacttcctcctataaaaaccctaagtctatttcaytttctttgaaaagattcctctgcattaatggatgttgtccttactacaatagcatgaaaaaaaaaaaaagtctccttaatgcagcttagcaattttccaggcttgatatcagtgactccatcttgggctattgactccatgctgagctgctgctaaactttgaggcccacgaagaaactgtgaaaaatatttccttcacaaacaactgttataaataaagttttggtgttgcaaaagaaatagcactcgaatataaattttctttttaattctcagcaaggcaatgtacttcttttttttttttttttgagacagagtcttgctctgtcgcccaggctggagtgcgtgtcgcaatctcggctcactgcaagctccgcctcccgggttcatgccattctcctgcctcagcctccggagtagctgggactacaggcacctgccaccacgcccagctaattttttgtattttttagtgttagccatgatggtcttgatctcctgacctcatgatccgcctgcctcggcctcccaaagtactgggattacaggcgtgagccactgcgcccggcggcaatgtacttctatagacgggtgcgccctcacagatggagcaatggtgagctcacacctgggcaagggaggggaaggggttcttattcctgatgcacgtggcctctgctgctgtgtcgttcccctgttggctagggttagaccgcacaggctaaactaattctgattggctaatttaaagagagtgatggggtgagcggtttggcaggaaaaatggttaaggcggggcaggaaatcggaatgagtcagggtggagcaggtgattgaaatgagtcagggtggagcaggtgatggaaaaaggttgctttacgaggaagttaagtttaaaagtaaaaggcaaagattgaccatactgacatattgattctttgaagagaaatttagaattcatatctaacacaaccgtttttgcaacaacacacaacccaagaaagctggtctcaatattattattattattattattttccgagacaggctcttactctgtcacccaggccggagttcagtggctcaatcttggctcactgcaacctctgcctcccaagctcaagtgatccccccatctcagcctcccaagtagctgggactacaggcgcatgccaccactcctggctaattttttttgttttttgtatattttttgtagagattgggttcaccatgttggcaaggctgctctctcaaactcctggcctcaagtgatcctccccaaagtgctgggattacaagcataagccaccacgcctgatccccaatctttttttgtttgttttgtttcatgagacagactctttctgtggcccacgctggagtgcagtggcgtgatctcggctcactgcaacctctgcttcctgggtttaagcaattctcccgcctcagcctcccgagtagctgagaattacaggtgcccacaaccacgcctggctaatttttatatttttagtagaaacagggtttcaccatgttggtcacgttggtctcaaactcctgatttcaagtgattcacccacctcagcctcccaaactgtcaggcctctgagcccaagctaagccatcatatcccctgtgacctgcacgtatacatccagatggcctgaagcaactgaagatccacaaaagaagcgaaaatagccttaactgatgacattccaccattgtgatttgtttctgccccatcctaacagatcaatgtattttgtaatctcccccacccttaagaaggttctttgtaattctccccacccttaagaaggttctttgtaatctcccccacccttaagaaggttctttgtaattctccccacccttgagaatgtactttgtgagatccaccccctgcccgcaaaacattgttccgcggagcctctcccaaaacctataagaattaaagataatcccaccaccctttgctgactctcttttcggactcagcccgcctgcacccaggtgaaataaacagtcttgttgctcacgcaaagcttgtttggtggtctcttcacacggatgcgcgtgacacaaagtgctggggttacaggcctgagccaccacacctggccacccccaatctttaagaatattctggccgggcgcggtggctcatgcctgtaatcccagcactttgggaggctaaggcgggcggatcaagaggtcaggagatcgagaccatcctggctaacatggtgaaaccccgtctctactaaaatacaaaaaattagccgggcatggtggcgggcgcctgtagtcccagctacttgggaggctgaggcagcagaatggcgtgaacctgggaggcggagcttgcagtgagccgagatcgtgccactgcactccagcctgggcgacagagcgtgactccgtcccccccccaaaaaagaaagaatattctgtatgtagtttttttgttttgtttctgacagacgcaaacgcactcttctagtaatgactaaagacttcttcgtttaattcaccaatgaactaatctgacaatttatgtaacaaataaattcctataaacataagctcccttgcccctctccagtggcacaatctctgatttgccatcctggttgcaaccttcattactaagtaaacgcttacgtaaaccttaataatgagattcgggcaatatgattaaatattggtttatttgagtgcaaagtttgaggatggcgacccggtaggacacagactccaaaagatgggggtcagtgcttcgaaagggagaagtttgagggtcgtttacacaggcagggtctgggaagcttaacaggatgtcaacattttccatagaaggttaacgcatagcaatttgattggttcaaggcagtgtttctttttgggaagggtctatttaacattccacattaaggatgtaatagtcaagcggtcatttatcttattcaatgcgtattttatctcagatgccatctggtctgagctgggaacaagaaaataagggagttaatctataacaaaaggtcggcaattaagaggtcgtgcttcgtgatctggtctccaaagtcaactttcctcagggactttcagaatccccaaatagactayccactttctttcacacttatttsyctctaacttgttgatttcttttttttttttctgttttttaagggttaacaatctcttgggtgcactctgacttccatgcgctttatagaaaaaattggtcctgaggccagcagcaacagtcggtctcaggaacttgttagaaatgcacatttttcagccccaccccaaacctactgaatcagcagttttgctggtggttctcaatctctctttaacgtgccctctgggtgctgcggatgcacgctgaaggtagaagatcgctgcaggagatttccgcgtcgggcagatgaaagcgctctgcaagcccgggtgttatctgcgggccgggtccgcggcttctctggtggcactaggaccgcggcggcgcggccctcgcagccaccgcctcgggcgtgaggcggagcstagctgttcctggatcctgggcctggctcctcgacccgcccctggaggcggaccccacttgacttaaactctggggcccgggaggccgccggttttctccccgcttgccggggtggtcctcttccctttgtcggtaagtgtgagacgagcaccccgaggtccctccgccttccggggtccgggcggggcgggggccgggagccgggagccagaggcactcgcggtccgggcctgcgcgcggcgcagagcgcttttgttctgcggcaaagacgcagtcgcgggcggccccggaacccgggcctcgggccccgccggctcgcgcgtcccgccgtccgcccaccggagctgggccgggccgccgcgcttgcttctgcccgccgcrccggggccggccctgggcctccgcggatgccgagccttgcaccggagggcgggcctcgctggctgttttccctcattgcctggctctgcgcggtagaggtcgcgagtggcgaaggctaggacgcattttgtcgaactgcgaggcgcggctggtgaggcgggtgggtatgagagctgcttatgtttttaaggctttcctgtcgctggagtgaaaaagaaaaatctttttttttttttgctatttcccgagggttctcctcctccccggccctcttaagccgaagcctcctggaacagaattgctgtactggcatctatctccaagtggtccgcgaacgcttctgcgccggcgatggtttctgttcctcagcaatagttccttgaggcatttttaaatgcacaaacgcatacccatcttaggtgttctcgagggacacggattccctaagcaaacgtccttagggtcctgagttcagcagcaaactttcggggaatcatttccgtgaaaacaatttatttgtagtacatcgagtgcatactgtcttaacataaggatgtgtatgagcttgaggcgcattttcatttagtggcgggcgggtgcatttcagtaggcgggccgcagagcttgtttggggattgcatttttctgctaaatgtgttagctttaatcatgtttcagtcactgttaatgtgcatgcatgttaaggttttaggttttttcccctgtgcagtcggatttttttctgtttaatattaatccaataaagacaagtgcagagataaagtattattgttttgcagtgatactacaatagcggacctagaggagcgcacataaattctaacttaagtgaatggtattttcaggccagacctagtttctatttctgttacttaggacacttaataagaattcagtaaacttagcatgctttcagtgcagccataaaagaaaacagttttgcacagcagtgtcatatctagtaaacacattagcatgtgctcttttattataaaatgtttcttgctgtccctaggaccaaagaagtaaacactgtgtggagagggactgacgtgtttggagggaaatgggaatgtacacgataattaaagagtaaagttgtgctcaacggtaagtgtatcacctctaagaaacccgccctgatttaaccaggcggttattcacactcaactatggagtaattcacctattaccgaataaaattactagctcagtgaatcaacatcggttttaaattaaactgtgggtcacaatggaattgacagcaaagcttgagaagaaatgttgttggcatagtactgaaaaatcagttgttaatcttagcaaaataaggaaagaggtctttggtaagggaattgtggtggaagttacctgggcagaggtctgcttctgtctgtgctgtgtttatttgattgtttttattatattttattactgttggtggcacataggggaatgtggcrcagagcaccactctggraggatgcttcccgtgcagccaaagtgatcatgtccagggctttcatctgtaaccacaaagtgtgttaggaagtctcacctaatgattaagaccatggtccctgtaaccacactgctttggttcagatcttggctgtagcactcagccaaccctggaaaataaacctctgcctgttctctcatctataaaatggggacaagcactaatgtcataggattgttatggtagagttacatgagtttcatgcatatcacagttaaacagctcctgatgcatggtaagtgcccaataaatgttagctattgtcatgttagaggaaatagattttgtggcctgggacatgtaatgctgccttagcagaaattcagctggttcatttaagctctaaatttatgagctttttattgattaaacccatcactgtagatcctcttagattctcttttttgtaggtcttgttttgttaggaagtacctgtcactactggtccacatctggatttacctgcaggcttgtttggaataaaaaatgcctccaaattcctaggcaggacaaacttgccccaaagctttgttgttctacattatctctgtgattgtacaggaatctctcttccctcctagattatcagtgtcttggatataattggagctcaaatgcttagggaattgatttaatgttgcttaaaacgtatttgtaggccaggtgtggtggctcacgcctataatgccagcactttaagaggctggggcaggcagatcacttgaggccaggagttcgagaccagccctggcctcaagttggccaacatggcaaaaccccatctytactaataataacaaaaattagtcgggcgtggtggcacatgcctgtaatcctagctactcaagtggctgaacccaggaggtggaggttgcagtgacctgaagtcaccccatcgtactgcagcctgggtaacagagcaagattctgtctttttwaaaaaaaaaaaaaaaaaagcatttgtgaaggtgaatttcaagaatctaatcaggcctccctccctcccccattagaggcacactctattatgtaaaacagacagggagtgtattcattttgagataagtccaggataacagttgactaaccctggctatagatacgcaagttaaacattcactttggaagaagattgtgaagaaagaatcttggaccttgaggaattctaaatgctttgttgggtggcaactatgcaatacttacactattcctaataccttaagtgtacttgtaagtgaagagcaaagttggaggctgttgaggtaaataatctcaagtgagattggaactatacrttttatgctcctggttttcatgatcgcaaagatttaatgacagtaacttaagattctcttgatgtatcaaattacaaggtttcatttgtaaataaggtgattaaaatgacaaagtgtattaaaagaaattgtattgtccagtgaagttttaagaaacagaaaccataaggtgattattatttttcaagccccaaaggagaattcattagatgacatacttttaaagttcatggatcagggtcgggtgcggtggctcatgcctgtaatcccagcactttgggaggccaaggtgggcagatcacctgaggtcaggagttggagaccagcctggccaacatggtgaagctccatctctactaaaagtacaaaaaattagccaggcgtggtggcacatgcctgaaatcccggctatccgggaggcagaggttgcagtgagctgagatcgcgccactgtaccctagctcgggtgacagagtgagactctgtcttagaaaataaagtccatgggctggtcgcagtggctcacgcctgtaatcccagcactttgggaggccaaggcaggtggatcatgaggtcmggaaatcgagaccaccctggctaacaggtgaaaccccaaaattagccaggtgtggtggcatgcgcctgtagtcccagctaactcaggaggctgagataggagaattgcttgaacccaggaggggaggttgcagtgagctgagatcacaccactgcactccagcctggacgacagagcgagactgtctcaaaaaaaaaaaaaaaagttcayggagcgcaacctttgggttttgatggatccaggatctaaatccaaaagagagttttaaagatttgggacactgtatctttgagctctgctgtcctctgctttggttttcaggcagaccatccctccactgggcagccctgacatctccagatgcaagcagcttcaagttgttcagagcatgccttttgtaactatagttagagataaaattcataagccatttattcactcatttacacccagtgtacagtttcagtggtttttagtatattcagagttgtgcacccatcaccacgtcaatttaagaatattttattacccccaaaatatctccatactcaatagtggtaactccccattttctccaacgcacctttccctaggtaaccattaatctacttctgtaggtttgcatattctgaacacttcatataattgaagtcataatatttttcatccagcatgttttcaaggctcatttatgttaacacatgtatgttacttcattcgtttttattaccagatattccgttgtatggatatgccacttttgcttattcttccatcagttaacagacgtttgacacgttttcactctttgactactgtgaatagtgcagctatgatcattcatagtgtttatgtagacgtgtatttttatttcttttgggtaaatacctaggagtggaattccttggttatgataactgtttaacattttgaggaactgccaggctattatccaaagtagatttaccactttattttttatttaacttttgttttatgtttgggggtacgtgtgtaggtttgggggtacgtgtataggtaaagttgygtcatgggggtttgtggaacagattatttaatcacccaggtattaagcctagtacccaattagttgtttttttttcaaatcctctccctcctcccacgctttgcctgcctataggccccagtgtgttgagcccctctacatgtccatgtgttctcatcatttagctcccacttatgtgtgaaagcatgcaatatttggtttcctgtgttagtttgctaaggataatgtcctctagctccaagctcctgcawaggacatgatctcattctttttttatggctgcatagtattccctagtgtatgtgtactgttttctttatgcggtttaccgttgatgggcatttaggttgattctgggtctttgctattgtgaatagacatgcacaattttatacagcaatgtttgagagatggttggtctacatccatagacacttaacttttatagccatagaagtgagcctgaagtggtagctcattgtggttgtgatttgcatttacctgatgattagtcatgttaagcatctttttatgtgcatgttgatttctttggagaagtatctattcaaaacttttggccttaaatttgtgttgtctttggattgtcaggttgtaagtttttaagatatcctggattctgatccttccttactagggaccataaatgtgagggtttactcctgggttctaggttctrttccattgatcaatgcctgtcctgtgtcagtactatatggtcttgtttattgtagttttgtcgttttgtttttttgttttttgtttttaagactgaatctcactgtgttgcccagaatggagtgcggtggtgtgatcttggctcactgtaacctccgcttccgattcttctgcctcagcctccaaagtagctaggattacagacacttgccaccacaccgcggtaatttttgtatttttggtagaggcgaggtttcaccatgttggccaggctggtctcgaacttctgacctcaagtgatcagcgtgcctctgcctcccaaagtgctggaattacaggcgtgagccactgctccctgccggctactcccttttcaacccctcctttttctgtgtcaaagttgctgagtggcagtcagaaaatgaaagtacctctgattggtcccctcccacaaccaatcaggctagtggctggccactacttcatttacataacgtgaatccatggtaaacctctagagagtatttaaactgcagaaaattatgtaacttgactgtcttgagccactgctgcccccgctcccaccctgtggagtgtgctgtcctttaaaataagtctctgctttggctgccttgcttgtgtggtttgttcagttctttgttcaagacgccaagaacctggacarctaccctcaactgcatggtttagaggaactcttctgttccactgaaggcattttgtctatctccagtggcagaaaattgactcactcataataggagcgatgaagaagcgatacttctggccaacatggtgaaaagccatctctactaaaaatacaaaaattagctgggcgtggtggcgtgtgcctgaaatcccagctgctggggaggctgaggcaggagaatcgcttaaactcaggaggtggaggttgcagtgagccaagatcacgccactgcactctagcctggtgacagagcgagacttcgtctcaaaaaaaaaaaaaaaaaaagaagtgatacttcgaatacagtttttacctcaacacagtgttgtcttaatatggtttgtacccgcctgccacacactgatgtgtcatgtatacttgggggtgcttgtcagcgcttttcagatatttaagatcaccagacctctagtacacggtgtgtccaatcttttggcttccctaggccactttggaagaagaattgtcttgggccacacataaaatacactaacactaacaatagctaatgagctttaaaaaaaattgcaaaaaawaaatcycataatgttttaatcatgcttatgaattagtgttgggcctcattcaaagccgtcttgggctgcatgctgcccatgggccgcggattggacaagcttgatttagtagatgtttccttgagttgggtatccagagggctccgaaatgaattacttggcagaattctcgtagggtaactggcttccgcttcatgtgttctctgttgtctttaattcccattttagggaataatacaaatagaaaacatggtctaaaatttgtctctggcttctctgctctgaaggcacaacagactagtgtcagtattctagcctgaatgatgatagtctgttgcattggtctgaacttcctgctggccagtcaagatgtgtgattgccagcacttcatgctgtacctgtgttaacgagtcagaaaaagtagagcaatttatttctcccttttttagggagaaagccctgtggctctcactggtgaagcttggtagttgggatatatttagcttacttggctctgcatggggaacgtttggtatgtcctccacaataggtgtgatcatcctgctgggaatcacgattgcaggcactttttaatccagtgttgcctaagacaaagtacaatggattaggatatctgattggatggcctgtggttctgaatagagtttgtagctggatacatgaaagatgggaaggcagagttgtaggtgaacagcttcaccgtggtgccctgatgacttgctcttctcatagaccatggaggcaaagcttaggcttaatcacaggctgacccatattctggcaggacaaccctgcaggtcctccaagaacaaagtgagagaaaagcagccctgtgagaaacagtcacaaagcagtttctcatctgcctccttggtttcaattgtgcataggactttaccaccttggggggtatacttgctggctataaaatggccacagtttggtgttctcatctggcttggtgtcatcccgtggggctggggatactgatcttgattttgctgttggacttagtaatatatgaatccatttggccttttgctgactgcagttacagaagcatagagaactgttctgccccttctaaccactgtgctgcaagagggaggattgckagtctttgttaatttgttgtgatacttaaatgagataaaagtatatgaagcattccacatagttctttacatacagattttcaaatgttagttgtttatagtagtacagatgtacctcagcttacgatggagttacatttcgatwacctgtattaagtagaaaatgtaagtcaaaaatggggttttatagacatgatgggatgggaaaacacaacatccaaaaaacttagctaacacagtacaccattgattggttttttgttttttttaatgtgccgtgggaggggcagccctgcacgcccgcccacccccaccccccacaacaccagcctgcctccgcaggggggatttttgttttttttgtgtgtgtgtgtgtttttcattgattgttaatgctcatgatcacgtggctgactgggtgctmtggcttgctgccaccacccagcgtggaagaatatcatactgcctatcacaggcccgggaaaagatcaaaattcaaagtacaatttctgctgaatgcctgtatcacttttgcatcattgtaaagtcaaaattattaagtcataccattgtattgtggtccaggaccatctgggcttagaaaaatggattctagaaagcctatttaaggactgataggctaattttttctgtgactaaggtgacagaaagccagagctagtacaggttgaataaattgtgttacatttggaattcctgaaaagtggctttttacactgaattgttagtattggtggtttgttaactttctacaggtatctctaatttttcgaatgcttatgttgcaagtcaggttttcaatgaaaaatagactttactcagtttaaccatatcagtggatactcttcaaataaactttcctttgtggaacataagaagtggaactttaaaagccataagggaagttttcaatttaaaataccagagcgaatttatatattttaggtataagaatagtattttaatgtatattatttatttcttaagtcctacgtcttttaggtactkaaatgcttacagatgaaatcatgctatgtctgtggttggcatagatagaaaaggaaacagaagtggtcaggactttttcccatctataagtttacattaggacttctcttttttttttttttttgagayggagtctcactctttcgcccaagctggactgcagtggcgctatcccggctcactgcaagctccgcctcttgggttcatgccattctcctgcctcagcctcccgagtagctgggattacaggcgcccaccaccatgcccggctaattttttgtatttttagtagagacggggtttcaccgtgttagccaggatggtctcgatctcctgacctcgtgatccgcccgcctckgcctcccaaagtgctgggattacaggcgtgagccaccgcgcccggcctaggacttctctttaatggggtgttcagataatgtttgtttattcagcaaatactgaaacctgctagacattatctacatgcatgtgtcttttgggttggcctgaaagacttttatgcctgtcgtattggctgttaatagtacttwgattcactctgatgatgttccacttacctttaataaattgtcaacccacttttctttcccttttttgagacagatcttgctgtgtcatccaggctggagtacagtggcactaccatagtccactgcactctcgacttcccatgctcaagtgatccttccatctcagcctcccaagtagctgggaatataggcgtgtaccaccacgcctagctagtgtttctatttttatttttatttttttgtagagactgggtcttactgtgttgcccatgctggttttgaactgctggactctgcctcagcctctcagcatgctgagattataggtgtgagccaccacacctggccagtggtaacccctgtgtataaaacaattcttaggctgagatggcttgagcctcaggagttcaagaccagcctaggcaacatggagaaacctcatctctacaaaacattaaaaaaattagccacacggtggcattcacctgtagtcccagctgcttgggaagctgtggtgagagaattgcttgagcccaggaggtggagttggcagtgagctgagatcgtgccactacactctagcctggatgacatagtgagaccctgtctcaaaaaaaataaaccaaaattcttgctgtggctcagtttatacttccatattctatttcttgctgttttatctgacctacagcagacctggccaccatgccatattcacaatattaggttcattttctggtttgtttggttttcttttgtttttgagacggagtcttgctctgtcgcacagtctggagtgcagtggcatgattcccgctcaccactgcctcaaccccctgggttcatccaatgcctcagccccccaagtagctgagaatacaggtgtgtgctaccacaatgctgcccaggttagtctcgaacttctgagctcaagtgatctgcctgccttggcctcccaaagttctgggattacaggtgtgagccactgtgcccagcctaggtctattttcttatrcttctttctattcatgtgtatgtgtgcttgtgcatgtgtgtttaacatggatagtaatatggttatttcctataggtataattttagattattttttgctttataattttctgtagtaagcccaatttacaaataaaggaagctgctgggttgacaacttttcagttatttgcattgtgtggatatagaatattttttaaatttcacagatattgttaatcttagtgagatctttaatatgaaagtccacatccataattatctttatgctttcttgcagctgtttacttctaattatttcctgattcacaaattaatttttgcaattcacaacttcaagaatacttggactattggattcaatccatagtaatctgcaaaagaagagaagcagaattatacctagaagtctactaatggacagttagtcacccacctacatgttgaggtactctggacctttttctttcacctcactggaagggaatgtgggtgggaatttaagacatctacttccttgttgattttccacctatttgttctattcattgttgaaagtagggaattgaagtcttccactcttattggtgaattgtggtttttgcttcttgtattttgatgctcttttaggtattaataacctacagatcacatttgacagttttaagtaaacaagcttccagattaacttgctttggggaggtattgtgatacaagatggtgacatcctgtccttgagtaaagaatcttacacattcctcaaatgggtatactgattaatgcataacctaacactcaaaagggtgctgctttatttgtaaatcaggttttattgatgcaagttttcttgcacttagacattttagcctatatgttgcaatcagtagccaatgattataacctcagtattgtatcctccaacgaaaaaagacaatttgagtattaggagtccccctcccttctcctataatttcatataaaagccttccaacttgtagcggactccagaacactttgaactctgttggtatgtcttcccagattgatcctcacatttggcctccagtaaacctttatcagattatttctacctcaagaaccttcgttttagacaacagtgcatatatgtttgtaattgttaccttgatgggttgatccttttatcattataaaatgcatctctttatcagcattttttgtcttagtctgttttgtctgatactagtataggcattcctgctttctttttttgagacggagtttcactcttgttgcccaggctggagtgcagtggcacaatctcagctcactgcagcctccgcctcccggattcaagtgattctcctgcctcatcctcccaggtagcagggattacaggcatgtaccactatacctggctaattttttgtatttggtggagacggggtttcaccaggttggtcaggctggtatcgaattcctgatctcaggtaatccacccacctyggcctcccaaagttctgggattataggtgtgagccactgtgcctggcctgcattccagctttcttgtagctatttgtgtgataytttttcatcattttactttcagtctgtgtttttggatctaaggtatatctcttggaaacaataacatatagttggatagtttttaaaatccagactgacattctctgtcttttggattgtgatattatgaaatatatctctggtctttatccctgttttcaggcatacactcctaaaattcgagcagtctccaaagtgataaatgtcttttttgtatgctaatgagttgacttatggctgacatcccctagtttcagaatggagggctggtcacctgaaagaccaaggcccgattaaagggttgggacttttcagccctacccctaattcctggtaccaattgtctatcttagtccattttctgttacttatagcagaataactgaaacaggggcctttatgaagaaaaggaattcatttcttacacctttgaaggtgcacctggttgagagggagggggtgaggttaagttgatcaccaatagccaatggtttaattaatcagatctgtgcaatgaagcctccataaaaccggaaaggatagagtttagaaggcttttcaggttgctgagcaggtggaggttcctagagggtggcgtacccagggagggcatggaaatgctgtgccccttctcatgtgaccttgccttctacatctcttgaactgaatccttggtaatatactttataataaactgataaggtgtttccctgagttctgtgagctgctctaacacgacaaaccaaaggagcgggacatgggaatcccagtttacagctggtcggtcggaagcacaggtaaaataacctgggacttggtgttggcatcagaagtggggggcagtctcggctgggcacagtggctcacgcctgtaatcccagcactttgggaggccgaggtgggtggatcacgaggtcaggagatcgagaccatcctggctaacatggtgaaaccctgtctctactaaaaatacaaaaaattagccaggcgtggtggtgggcaccggtagttccagctactcaggaggctgaggcaggagaatggcgtgaacctgggaggcggagctcgcagtgagccaagatggtgccactgcactccagcctgggtgacagagtgagactccgtctcaaaaaaaaaaaaaaaaaaagtgggggcagtcttgcaggactgagccctaaactgatgagatctgacactatcttcatatagatagtcttggaattaaaatgaattagaggacacccacctggtgtgtacactgcagaactgattgcttgttatgtggggtgagacacccacacatctggtgtcagaagtgtgagaaagtttattcctacattctcagaattgtttatataaaaatgttattttttatataattacatttacctctaatgttttactttttgtttttatgtctcgtctttttattcctttcttattccttagtggggttkattttgcataaatgagtattttctaatgtagcattttaatttctctttgttttttctgtttttaatttctttaacgatattttcactgtattttttgtaacttcatggaagcacaaattctttttaaaagtattttttatattaaastatcagtgatggaggctggcagagatcttggggcgagaatttattytctcagagaaatggtagtgatggaccatggaaacttgtctatggtaatctgtgttagaatatattcttgaaagttctaagaatacattatatccacaagtagattatgccatcctagagactgcagctgacccttgaacaatgtgagtttgacccatgtggatccacatacacatggatttgacttttttttttttaagagatgaggtcactctctgttgcccaggctggagtgcagtgtacagtcatagcacattacagcctcaaacatctgggctcaaacagtcctcccatctctgcctcctgagtatctgggactgcatccacacactaccttgtctggctacacttggagtttcttctgcatctgccactctactgccaccctaagtcgtaatccctatgttgttcaagggtcgattgtattttcctttcacagtctatttgtgtagctagtaggcaatcttccaaaaacttcaatttaggtcgttccggagtgcttttcgagttttcagttttcttctatgccagtgaaggagagggatggaggaaaaaaaaaacccaaattaacataaagatagtttcccttcctacccatatgctctgtattaattgctagggctgtgtttgagataggaaaaccaaaacttcttcacacaactgaccacttcatctctggtcaccagaatgtatttggatttcttcccatccgcaaactgttttccagctgacaacaactgggtgtcctacaattcaattacatgttggcatcatctacctggagaaagcttcagatcccacaggttgaggactcagtcccacaagactgcccctgacttcgccagacctgtacttttgaccaacctgttacaaagaggggattgtcaagactccctccgtggatttgattaatttgctagagctcacagaactcagggaaatagtttacttattataaagcctattagatgaagagccaggtggaagagatgcatgggggaatgcatatgtgagcgcttccatgccctctccaggtgctgccccaccctacggtcacctctatgttaccagacactcctgttactcaggagattacaaaggtctcaggagctctgtgtcaggaaccgggttcaaagaccacgtattagtgcaaaagattgtataccccaatctacaagagttttaggtgccccgtgtctggaatcatgggcagagaccaagtatgtatttcttatcgtgggctactatgacagtaatgccacagactgggtggagaaatttatttctcccagttccggcggctagaagtccagggtcaatatgtttgatttctgttctcttgaagcttctctctcagtggcttgcaggtgactgtcttcttgctgtgtcctaacgtggtccttcctctgtgggccgacatcgctggtgtccctcttcctatgggggatactagtcggattagagccccactctaatgacctcacttaaccaattatctccttaaaggccctatctccaaatacactgagggtcagggctttcacttatgaattttggggagggtacaattcagttcatgagactctctcctccaagttgacgtaaaagccaggggacagtgagggggacgggcagttatgaagcatcattaattctccttagaagtgctgcttttcttctgtcagtgaacactgtgacccattctgcttccaaccttgtggactagtcaaagtagtgagaggaacagagtcctaacgcctgagagttgtaaaatgagtgtcagcatgtggtggctgccttttttttttttttttaacrgatagactttattttctagaagagttttaggtttaaagaaaattgaggtcaggcatggtggttcacgcctgtaatcccagcactttgggaggccaaggcaggcagatcatgaggtcaggagtttgagaccatcttggccaacatggtgaaaccccatctctagcaaaaatataaaaaatgagtcaggcatggtggcgcgcgcctgtagtcccagctactcgggaggctgaggcaggagaatcgcttgaacccgggaggtggaggttgcagatcgtgccactgcactccagcctgggcgacagagcgagactccatctgaaaaaaaaagaaaaagaaaactgagcttatagtacagagcattcccatrtaagagctttataggaacctcccatctccaaaactctaaggttccactattagcaacttggattagtcatactgatatgttattattaaagtccatcactaacattagagtttactctgtatccaatgggtcttatgggttttgataaatgcttaatagtatgcatctactattataagagagctttaaaaaataactttatgaaatcaaaacatacctaagaaagggtacaaatggtaagtgtataatgcagtggattatgtagggaacacacwtgtgtgtaagtatcaccctggtcaaaagcagtcttcatgctacttaactaccaattgctattccatcacactttgtaaaaagtaccactacagtccctagatggttggttttgtctgtgtttcaatctttatataaatggaatcatggattattctttaatctctggcctttttcactcagtcttgtgtttgttagattcatgttgcatatagccttttatttttgttactatagtgtttcattaatatgaatacatttctattttgtttgtttccagtttttgcttactgcacctaatgctgctggcagtgttataattatgcatttctgtttggtacatacctaggaatgaaacttctaggtctcagggcttgcatttattaacccttggtagatgatgccatacgtctttccaaagtgttggttactttaaggatcatgatatactcctatcaccattgtaggagagttccatttgttccattttcttgccaacatgtggtattgagagttgaaaaaattctagccattgtgtatagtattaccaccttatggttttcatttacatttctgatattcataatggatttagcacttaccaaaaattttgccatttaaatatagttgaccattgaataacataggaattaggataactgactcttgtgcagtaaaaaaaatccacatttaacttttgactccgccaaaacttgatcaacaatagcatgctgttcagtggaagccttaacagtaacatwaaacagttgataaacacatattttgtatgttacatgtattatatgctgtattcttagaataagcttgagaaaaggaaattttattaagaaaatcataagggattgggtgyggcggatcacaaggtcaggagttcgagaccagcctggccaacatggtgaaacccygtctctactaaaaatacaaaattagcctggcatggtggtgggaccctgtaatccctgctgctcgggaggctgagacaggagaatcacttgaacccaggaggcagaggttgcagtgagccgagatcgcaccactgcactccagtctgggtgacagagcgagactccatctcaaaaaaaaaccaaaatcataagagaatatatttactattcattaagtggaaatggatcatcataaaggtgtttatcctcatcacatttatcttaactaggcggaggaggagggaagagaaggggttggtcttgctgtctccagggtagcatagacaaaagaaaatccacgtataagtggacccacgcacttcaaagccacgttcaaggatcaactgtagtgtctcatacagtgtttaattaagcttcatgcttattttttattgagttgtctacatttttctttttacgtaattccctatataggctggatatgatctctttgctatgtattgcgaatataatcttctagagagtgactttactttttcacttccttaatggtgttttttgataaacagtggtgattaattttgatgcagtccgttttatggaccttttttcttattgttcattgtgccctgttataggaaccttcccctatcccgagggcataaagatattctcatgtttttttgagatggagtttcgcttttgttgcccaggcttgagtgcggtggtgcgacctcggctcactgcaacctccgcctccctggttcaagggattgtcctacctcagcctcacgagtagctgggattacaggtgtgtgccaccacatccggctaatttttgcatttttagtagagacgggggcttcaccatccatgttggtcaggttggtctcaaacttctgacctcaggtgatctgcccgcctcggcctcccaaagtgctgggatttacaggcgtgggccaccatgcctggcctgtttctggaaactttaaaacgataatctacctgggattgatttgtttgtatatgtctcttgstgtgtaattggataaggcttattttcattcgtggcatatagataaccaattgacctagcttcatgtattgaaaagaacttttttcctaactttgtcataaaacaartgtctatatataaaagtgtgtgtatgtcttcgctattcatgcttgttttgcatttccatggaaagtttataatcaagcttgttaccccaaaaaatcaaaaaatccactgggattgtattgactcttaattactttttctttctttctttyttyttttttttttttttgagacaagagctcattctgctgcccaggctggagtgcaaatggtgcaatctcagctcactgcaacctccacctcccaggctcaagtaatcctcccacctcagccttccaagtagctgggacaacaggtgtgcacacctggctaattttttttttgtatttttgrtagagacaggatttcaccatgttgttcaggctggtcttgaacttctgacctcaagcagtcgcccagctcagcctcccaaagtgctgggattacaggcaagagccactgcgcttgacctaaattttgagattattggcatctttaatgctgtcttcaaatatttgaacatggcatatctttacactcagctgtttgttagagatgtgacacatccttcattttctaagtatttttttaatggtattttaaaagattactgctgataatattcttgcattttgaccttatttttgggcattgtaataaacagtaaaacaaaaagatctctacatagttttggattttctgtataacatctgatactcagttttgtgttttcctctctgcttatactcctaatatttttttctttataccagctaggatctccagtaaaatgattaatggagggatagtggcatcttccatgttactatttaattgttttagctaccatttatcaaaagaagtttccatctttataattttttaaatatgtaggtatttggggtttttttttgttttttgttttttgttttgagacgggctctcgctctgtcgccaggctggagtgtagtggcgcaatctcagctcattgcaacctccacctcctgggttcaagtgattctcctgcctcagcctcctgagtagctgggactacaggtgcccgccaccacacccagctaatttttttttttttttttttttgtatatttagtagaggccggggtttcaccgtgttggccaggatggtctccatctcctgacctcgtgatacccctgcctcagcctcccaaagtgctgcgattacaggattacaggtgtgaggcactgtgcccggcagtatttgattttgtcagaaattcttatcttagatttttgaaatgatctcatgatttttttttttttttttgaaacggagtctagctctgtcacccaggctggagtgcagtggcgccatctgggctcactgcaagctccgcctaccgggttctcaccattctcctgcctcagccttctgagtagctgggactacaggcacctgccaccacacctggctaattttttgtatttttagtagagacggggtttcactgtgttagccaggatggtctcgatctcctgacctcatgatccgcccaccttggcctcccaaaatgctgggattacaggcgtgagccactgcacctggccccacagtacttctgacaccagatgtgtgggaattttttcccaactgaccaattctctccacataccaactgggtggcttgtgatttgattcagttctgacactgtctacctgatgttaccatcagaacccacaagttaaagggctcagtcctacaagactgcccccacttgaagctagtcacaagtccaggtttgtacttctgaccaactggctataaagcaaacaaggtatgctttctctgaggtcactaccttcccagcacttcagtgtgttctgttcaccagcccagaagctcggctcatcacatctcaatgttcaagagttttgttttttaaaaaaaacagccttactctgtcacccaggctggagtggagtggtgccaccatggctcactgcagcctcaacccccaggctcagatgatcctccctacactgccttctgttttctgagtaggtggctgggactacgggcatgcaccaccatgacggggtaatttttttttttttttaattttcagtagagacagggtttcactatgtttcccaggctggtcttgaactcctgggctcaagagatcttcctgcctcagcctcacagactgctgggattacaggcatgagccaccacacccagccaagactttttatagagtccaatctccagctccccccaccactttatggaggtcagtggttagaactaaaagttccaaccgtctaatacttggttttcctggtgaccaccagctgtatcctgatggtatctaggggcccccactttaagtcaccttagtagcatagactcaggtatgtgcatacagagttcattatgaataacaaaagatatttatgaattagtgtttgcttatgccagaaattttcttttccttttttttttttttttttttgaaacagagtcttcactctgtcacccagactagagtgcagtggtgtgatcttggcttactgtatcctccacctcccaggttcaagtgattcttgtgcatcagcctcctgagtagctgggattacaggtgtgcaccaccacaccccgctaatttttgtatttttagtaaagatggggtttggcatgttagccaggctggtctcaaactcttggcctcaggtgatccacctgcctctgcctcccaaagtgctaggattacaggcatgagccaccgcacccggccttatgccagaaatttactgagttcattaaggtaaccttgaatagccctggggagtttagactttgcgaatgaacaatgagaatgtttttaaccatatgtttgaacttccctttttttttaaattctcatttttattgtcatgttagcttttttaaaaaatgcagttagcatggattacttagaagaaagtctgttaaaaataagtaaaaacagaaggtgattggcatttaaatgtaacaaaaagctagctgtcattgtgtggaatgaatttctgttaaacacgttagaaatttcattgacacttgccttatttattgttgtatcctctattgctcctcttcttcccaaattaaagatgaggctgctctgaagattcagtaattaggatggacagtcagctactaattttcttagatattctatctaggcaaaacagcattttaataaaatatctttatttcttacagattcctgacattcagacaactgacttgtaactgacttataactgacttgtaatacactgctactatatcaaaccgacaatgaattggaatgaaaaaccaaagagtgctacattaccaccactgtatcctaaaagccagccaccttttttgcaccagtctttaataaaccaaattaccacaacatctcagagttctttcagctatcctggaagtaaccaagaagcatgcatgtatcccggtaattcaaatccartttcacagccactgctgaatatccaaaattatcctcaacaaatttctgtttctgataygcataatgggacagttgtggcctcacacacttcagtagaaagaataacatatgcaaatgttaatggacccaaacaactaactcamaatttgcagatgtcttcargagttacccaaaaygtatggttgaactcaccaatgaggaatcctgtgcattctcatataggggcaactgtatctcatcaaactgattttggagctaacgtacccaatatgccggcactacagagtcaactgataacatcagatacctattctatgcaaatgcagatgatcccttctaattctacacgacttcctgtagcttaccaaggaaatcagggacttaaccagtctttttcagagcaacaggttgattggacacaacagtgtrtatctaagggactgacttacccagattacagaccacctccaaagctataccgttactcaccacaaagctttttaccagattctaccattcaaaaacaaaactttataccacatacatcattgcaagttaaaaatagtcagcttcyaaattctgtattaactttaccatcaaggcagacctcagctgtaccatcacagcagtatgccacgcaaactgacaaaagaccwcctcctcctccttacaactgtagatatggaagccagcctttgcaaagtactcagcatattactaaacacttgtctatggaagttcctcagagtcragaaatgctgtcatctgaaataaggaccagctttcaacagcagtggcaaaaccctaatgaaaatgtcagcacaattggaaatttcactaacttgaaagtaaataccaacarcaaacagccttttaacrgwcccattagatcttctgtggatggtgttcagactcttgctcaaactaatgaagagaaaataatggattcttgcaatccaacttcaaatcaagtactggacacaagtgttgcaaaagaaaagctagtaagggatattaaaacattagtagagataaaacagaagttttcagaacttgcaaggaaaattaaaatcaataaagatcttttgatggcagcaggttgtattaaaatgactaatactwcttatagtgaaccagctcagaattctaaattgtctctaaaacaaactgccaaaatccagtctggaccccagataactccagtaatgccagagaatgcagagagacaaacaccaacagtagtggaatctgcagaaacaaataagactcaatgtatgttgaattctgacattcaggaagtcaattgcagaaggtttaaccaagttgattctgttttaccaaatcctgtctattctgaaaagcggccaatgccagacycatctcatgatgtgaaagttctcacttcaaagacatcagctgttgagatgacccaggcagtattgaatactcagctttcatcagaaaatgttaccaaagttgagcaaaattcaccagcagtttgtgaaacaatttctgttcccaagtccwtgtccactgaggaatataaatcaaaaattcaaaatgaaaataygctacttctygctttgctttcacaggcacgtaagactcagaagacagtattaaaagatgctaatcaaactattcaggattctaaaccagacagttgtgaaatgaatccaaatacccaaatgactggtaaccaactgaatttgaagaacatggaaactccaagtacttctaatgtaagtggcagggttttggacarcwmcttttgcagtggacaagaatcctcaacaaaaggaatgcctgctaaaagtgacagtagctgttccatggaagtgctagcaacctgtctttccctgtggaaaaagcarccttcagatactgcaaaagaaaaggagtgtgataaactcagaacaaacacaacagcagttggaatttcaaagcctgctaacatccrcgttaagagtccttgttcagttgtgggaaattcaaattctcagaataaaataagtaatccctcacagcagacagctttgtcgatggtaatgcacaattatgagtcttcaggtataaatataacaaagggaacagaacttcagatagctgtagtgtcaccgttagttctgtcagaggtcaaaacattgtctgtcaaaggaataacacctgcagtgttacctgaaacartgtatcccgttattaaagaaggcagtgtttgtagtttacaaaatcaattggcagaaaatgcaaaggcarctgctgctttgaaagttgatgttagtggaccagtagcaagtacagcaacatcaaccaagatttttccactaactcagaaggaaaagcagaatgagtcaactaatggtaattcagaagtcacacctaatgtcaatcaaggaaagcataacaaattagagtcagctatccattctcctatgaacgatcagcaaatctcacaggagtcaaggaatagtactgttgtgagtagtgatacrttacagattgacaatatttgttctctggttgaaggtgatacctcttacaattcccaaatagcaaagatattcagctctcttcccttgaaaatggttgagccacagaaaccttctctacccaatcagcaagggattggcwgcagagaaccagaaaaacaattagataataccactgaaaataaagactttggttytcaaaaagataaacctgtacagtgcacagatgtttcacataaaatatgtgatcagtcaaagtcagagccacccttagagtcatcttttaacaatcttgaaacaaacagagttattctagagaaaagtagtttggagcatgccactgaaaaaagcacagctaacgatamgtgctcgtcagctgctattcaggaggatatttaccctcaggaaatagatgcatccagcaactatactccccaagatcctgcaagaaatgaaatccacagtgataaggcacctgtcttatacctacatgaccagctgtcagaacttctaaaagagtttccttatggcattgaggctgtgaatacacgtgaaggttctgtgggccagcaaactacataccagacctcagaagatcaaactgctgataaaaccagttctgactccaaagacccagcagatcaaatacaaattacaatattaagctcagagcaaatgaaagaaatatttcctgaacaggatgatcaaccctatgtagtagacaagttggcagaacctcagaaagaagagcccatcacagaagtagttagccagtgtgacctgcaggcacctgcagctggacaaagtcgtgattctgtgatactggactctgagaaagatgatatccactgctgtgcattgggctggctctccatggtttacgaaggagtaccycagtgtcagtgtaattccatcaagaactcatcttcagaggaagagaaacaaaaagagcagtgttstcctttggataccaacagttgtaaacaaggagagagaacttctgatagagatrtcactgttgttcaatttaagagccttgtaaataatccaaagactcctccagatgggaaaagtcattttcctgaactacaagacgacagtagaaaagatacacccaaaacaaaacataaaagcttaccaaggacagaacaagaattagttgctggtcagttttcatctaaatgtgataaactaaatcccttgcaaaatcacaaaagaaaaaaattgaggtttcacgaggtaacctttcactccagtaataaaatgacagcatcttatgaacaagcttctcaggaaacscgacagaagaaacatgtaacacagaactcacgtccactaaaaacaaaarcagcttttttgccaaataaagatgtgtataagaagcatagttctttgggacagtcattatcaccagaaaagataaaattgaaactcaaatcagttagcttcaaacaaaaacgaaagttagaccaagggaacgtattagatatggaagtaaagaaaaagaaacatgataaacaagaacagaaaggaagtgtgggagctacattcaaattaggtgactctttgtcaaacccaaacgaaagagccattgttaaagaaaagatggtatcaaatactaagtctgtagacacgaaagcgagttcatctaaatttagtagaattctaactcctaaggagtatttacaaaggcagaagcataaagaagctctgagtaataaagcatcgaagaaaatctgtgtgaaaaacgtgccatgtgattctgaacataygagaccaagtaaacttgccgtgcaggttgaaagttgtgggaaatcaaatgagaaacacagcagcggcgtgcagacctctaaagartcattaaatggcttgacaagccatggtaaaaacctcaaaatccaccattctcaggagtctaaaacatacaacattctaaggaatgttaaagaaaaagttggtgggaagcagcctgataaaatatggattgataagactaaattagacaaattaaccaatataagcaacgaagctcaattcagccaaatgcctccccaagtaaaggatcaaaagaaattatatctgaatagagttgggtttaaatgcactgaacgtgaaagcatttctctcaccaaattagaaagttcacccaggaagcttcataaagataagagrcaggaaaataaacatmagacctttttaccggtgaaaggtaacacagaaaaatcaaacatgctggagtttaaattatgtccagatatcttactaaagaatacaaactctgtggaagaacggaaggatgtaaagcctcatcctaggaaggagcaagcccctctgcaaggtccagtatgattttcttggtggtgtctacaayattgtaaagagtcgtaggtcaatatttgggctagcacctctcatgctgtctgggctgctgggaaagactttaatgtgttatgccactacctagtatttgttttgcctggtaaaccartgtttcattgggcaatatttgttttgtgttcattgccaccttattgtaaattgtagaaaattggtcgtcatgacgagctatatgtaaaacttgccagatagaaatatttcagttagtaccaagaaggctgtactgtgaaaaacattccacattccttgtgggaatgtcagaaaagtgtcaagtagctagtaatgtaagagtcttggttttgttaattctcctttggacttgtaatttgaaagccctgtgaacttgaaattttgttctgaatgttagaggataagtaatgatgaatactgaagtctttttgttcatatggaaatgggtcaactaattgtcctctttgaaacagttgatggctgtgttatcactatagttaaaatggtaacatctagcctactcataagatagaagaaccttgaaagcagtattgtccagtgttataatttaaaatctttaaagccaagctggcagctatgaatattaggtagcttaatggtagacttctcaatgtagtgcaggaaggaaggagaaaattgataactagttgttcatggtactaagggaacatttagacatagtggatattatatgtaaagcattgtgctgagaaagattggaaaactaaaggatttgaatggaaattgaagtctttgctctgcttttctgactatatttgttggggttcataaaacaatagcataaacaggatatgttttcctggaaaagaagatagggatatattcattttgtaaaaaattggtgatttcaataggttctttcatttggatccttggaacttgaggtggggatataatgggaacattggaagtgggtgggggcaatgtagttttctatctcatgtgtcctttaatatctggagatgtattaacctcttcagttcatgtgaggggaacataattacrtagtaaagataaactcattttttaattgaggtaagcatttcaaatagaaatcatttttccagtcctttttttagagttgtgttacatgtggttatatctagggcctttcaaaatctattttcagcttacrtgattttcctttgttatagtactaaaggagatgattagcaatatctagagttctgaaaatgaatatttaaatagtttcaggaataaaaagtacaaaagaagactggttaaaatttgttgctacaaagaaaaggacacagaaagacagccaagagagaggtaaagtcatctttttaaatcttcattcacttatctccctatctggtatatggaaattggattatggttatgatatgattgtaaagtatgattttatccatgttcttttttttttttcagtcattcagtgtttgtgtttgagtggtaggaggacatttttgtgttgtcgtgctgtggaatgaaaggctgagctttattttattttaataggaaaataagtcttatcacaatgagttagctaagaggtttgcatattttacctgtataggaccagacagcaaatactttaggttttctgggtcataaggtgtctgtcctgactactcagctctgactctgtttcagggaaatggctgcagataatatgtagatgagtatcagctgtgttctgattaactatttatttatttatttatttatttattttgagacagagtctcactctgtcacccaggctggagtgcagtggcgtcatcttggctcactgcaacctctgcctcccaggttcaagcgattttctccctcagcttcccaagtagctgggactgcaggtgcataccaccacgcccagctaatttttgtatttttagtagaggcagggtttcaccgtgttggccaggccggtcccaaactcctgacatcrggtaatccacctgcctcggcctcccaaagtgctgggattacagacatgagacaccgtgcctggcctctaattaaactttatctaccaaaataggcagcaggctggacttagtttgccagaccctggattcaattatttacatgttaatttgattaatcttcaatacaatttaggcaaggatatttccattttatagatgagaggttacatcatttgacttaagtttcattgctagtgactgaatagggacttgaatctggtcccctcttttcaaagtccattaagtgtggttgaggtatagtcagccctccgtatctgcgtgttccgtatctgtggattcaagcaactgtggatccaaaatatttgggaaaaaaattaatacaaccataaaaatagaaacttaaaagacaatatagtataacaactgtttacatagcatttacattgtattaggtattaaaagtaatctagaaattatttaaggtatgtgtggggggtatgctttaggttatataaaatatactatgccattttacataaggaacttaagcatccccagattttggtatctatttgggtggatgctgcagaggtgtcctggaatcagtccctcttcaatacccagggatgactgtattttaataatgagaccggtcctagctgtgttatttgctgggaagggatttgggctgaggaccaactagaaaaagtagagctttgagtatttgatttttttttgagacggcatcttgctctgtctcccaggctggagtacagtggcacgatctcggccttgctgcaacctctgcattccaggttcaagcaattcttctgcctcagcctcctgagtagctgggactacaagcacactaccacgcctggcttatttttgtatttttagtagagactggatttctctcactrtgttggccaggctggtctcaaactcctgaactcaggtgatccacctgcctcggcctcccaaaatgctgggattacaagcatgagccaccgtgtccacccgaatatatgatttaattagtggagtgaaagtaccttgttgttagggtttggctttgaaaactaaaagctagagctcaagagtttttgtcttagttttggttcattaaatgggcaaagagggggctgggcacggtggctcacacctgtaatctcagcactttgggaggccgaggcaggcggatcatgaggtcaggagattgagaccatcctggctaacacggtgaaaccctgtctctactgaaaatataaaaaataagccgagtgtggtggcgggcacctgtagtcccagctacttgggaggctgaggcaagagaatggcatgaacccaggaggcggagcttgccatgagccaatatgtcgccactgcactccagcctgggtgacagagagagagtcttgtctcaaaaaaaaaaaaaaaaaaaataggcaaagaggggttcagagcctcaaaaatggagagcagcagaaactcaccaagagaaacaataagaagcacattttataaaaggaattgacaacggttgtgaagagagcttcaaacaaatacttagaagcaggcgtgtaaaaattgagtagaggccgggcgaggtggctcacgcctgtaataccagcactttgggaggccgaggcaggcagatcgcctgaggtcagaggttcgagaccagcctggccaacattatgaaaccccatgcctactaaaaatataaaaattagtcaggtgtagtggcacatgcctgtaataccagctattcagtaggctgagacgggagaatcacttgaacctgtgaggcggaggttccagtgagctgagatcggaccactgcactccagcttgggcgacagagcaaaactctgtctcaaaaaaaaagtcagttagcattgaaacatgcatatgggaaaaacttgcatcaatgaagaaatatactcttaatcagaacaggacaaataacctaaagaggagggaatgaagagcagtgagaggcctgacagtgggaaaacaatgcctctcgggttggaaggcagaaagccaaaaatgcgaaagatacaaatgggtacgaagattggagtaagaaraaagctccttggaaacaggagagacatgattatctcaaagagaaagcgagaggcatgtttggaatctgaagctgaaaacactcaaaagacagatacacagattgaccagaggcttcagagataggcatgagttgaatgacatgtgcagacagcacagcaggatgagcamtgcacggtgaatgtgaggctgaaatactcagaatcatgatgaaagaaaaacacaaaccaggtacactaaggcaaagctgggtgagacagtccaggagacaagtcatayagctttgtcatggcacaacaagacgcaaataggtgagacctaagggaggagaaaaaaatctcaggtgatggctacatgggcatttttatttacttatttttatttatttatttattttattttttagacagtctcgctgtgtcgcccaggctggagtgcagtggtgcgacctaggctcactgcaacctctggttcctgggttcaagcgattctcctgcctcggcctcagcctcctgagtagcgtgaaccacctcacctggctgattgttgtatttttagcagagacagagtttcaccatgttgtccaggctgatcttgaactccaacctcagtgatccacccacctcagcctgccaaagtgctgggattacaggygtgagccactgcgcccggccacatgggcattttttaaatgcctattaggggcgagtgaagctggttctggagaagggatctctgggaaatagtgaattatataccttagacaaagaggctggagaacagtgaaccaacyatgaagtgagagaaaaatgccatgaactcccaatctgctataaagaaacatacatctggcctggtgtggggcccatgtgtgtcatcccagcacttgggaggtcaaggccggaggatggcttgagcccaggagtttgagaccagcttcggcaacatcaggagatcccatctctacaaataactttttaaaaaattagctgggcatagtggtgcgcacctgtggtcccagctgcttggcagactgaggaaggaggatcacctgagcccaggagttgaggctgcaataagccctgatgcagcactgcactccagcctgggcaacagagccaagaccctgtctcaaaaaaaaaaaaaacccacaggagaaacagatgtctaaattcagtagcaaaggttgcagcaaacttgaagtcctaagttagggtaaagagatgaagaggaaatgacaagaatttcttggaaagcaacttagagacccatctggggcttcagtgttactaattctgaaagaaagcaarcgaaaaagtggaagactgcagcagatctaaagaactaacaggacagaatactccacccattcaggtagaaaaagacaaaacaagaccccattattcagaagaaaatagctgcagcaggaatgaaatgtacagatagtccctgacttggcagtggtttracttaggatttcttgactatgatggtatgaaagtgatacacattcagtagaaagtgtatttcgcatacccatacagcaattctgtttgtttgtttgtttgtttgttttttgagacagtctcgctctgtcacccaggctggagtgcagtcgtgtgatatcggctcactgcaacctctgcccagctaatttttgtatttttagtcaaaacagggtttcgccatgttggccaggctggtcttgaactggcttcatgtgatctgcctgccttggcctcccagagtgctgggattacaggcgtgaaccaccatacccagcctcaacatattttcaataggtgatgggtcattatgaaaaaaggacactgaagctaatgtaacactgaaatggtctmaagaaacaggaaactatagacatgttttagaatatccaatacatggcaagaccaaaatatgaaacctatccttttcatgtattgtttgggactgactcatatttgtactctttgtattgctaatttacatagctgtttaaaagrtcacattcatactaatgatatgcaatgatacattttattgagccaagagtaaggtagaacagaacagcccagggcaatgaggatggggcaaggaggcaggagtagaaaacagcccccaaaagaarggcaagatgtcacgtgtatataacttacaattctataagtgaagagctatggttctgaaacttttgcttaactccttgccttaattttttatccctccaatatatattttccctctgaattttgattatatattgatcacagctaacattgagaaataaagtaagtaaagtttttatttcccttagataatgttaattcaagactctcgaagagaagcttcagtgcagatggatttgagatgctacaaaacccagtaaaagattcaaaagaaatgtttcaaacctacaaacagatgtacctggagaagagaagcagaagccttggtagcagtcctgtaaaataattacaagatgtggttttgtaattgccactgggaaatttctttccttttctgttcaaaatatttcgctgaaactaatgagaaatgccatgataaagatttctcagagtttggttcycactttcattgtatttcattgaaagtgcttaattaaaatggcttgagaactttgggtagccatgtgtaagaratggatggtattcacmggggaaacaaggtatttgaatttctactttattgaaccagatttaccattattttaaaaggaatgcttatacaaatcaatttgaaattctacccatcttgagggaggaccgttcctcagttaaggacttgtttatttaaatgggactgtaaatatgttttggtttctaagctatattagcaaaatttatttttcaaaaatgcccactgtgatgtsaatgtcaaaatatattcttaagtgttttataactaattgtaaactttttttcagaagtcttattttatacttgtgaaactgaacacaattttgggacaacgtttaaacattacttttcatacttgaaataaacatttattttttaaaaaactaatttgaaaccttcacagctcagtttctttttggtttcctacctttaaaaggacgcattttggaaagtgctttcaaaagctgaaatgcgaggtggcttatgcctgtaatcacagcaccttgggaggctgaggcgggcggatcacaaggtcaggagatggagaccatcctggctaacacggtgaaacgccgtctctacttaaaaaaaaatacaaaaaattaccaggacaaggtgggaggcacctgtagtcccagctactcgggaggctgaggcaggagaatggcgtgaacccgggaggcagagcttgcagtgcgccgagatcgcgccactgcactccagcctgggcgacagagccagactccttctcaaaaaaaaaaaaaaaaaaaagctgaaatgtcacagcagttgtgccagtaggtatttttagattgcgttcacatgagaacacaaaaaaatttactaggttcaggaaatttcaagaaactggaaggcaagatataactttatttctagttttactttatgactacgagaaaagggttggagtttttgttttgagacagggtctcactctgtcgtcaaggctggagtactgcggtgtaggatgaatgttcactgcaatcactgctcctgggtttaaataatcttcccgtctctgcctcatgagtagctgggactacagtgtgctaatacacctggctaatttaaaaaaaaattatttaatttgctaatctttgtattctagtgtgctgccaaagtgagcacataattttgtttttttgtttgtttgtttttgtttcttaatgtttggagaatttttgtggtttttttgtttgttctttgagacgtactcccgccctgttaccctggctggagtgcaattgcgcgatctgggctcactgcaacctccgcctcccgggttcaagcgattctcctgcctcagcctccagagtagctgggattacaggcgcccgccaccacgcccagctaatttttgtatttttagtatagatggggtttcaccgtgttggtcaggctggtctcgaactcctgacctcaggtgatccgcccaccccagcttcccaaagtgctgggattacaagcatgagctactgggtccagcctgtttgtttttttttgagacggaggcttgctctgtcgccaaggctggagtgcagtgacgccatcttggctcattgcaacctccgcctcccgggttcaaggattctcctgccgaatagctggaatcacaggtgcccgccaccacgcccagctaatttttgtatttttagtagagacggggtttcaccatgttggtcgtcaggatggtcttgaactcctgacctcgtgatctgcctgcctcagcctcccaaagtgctgggattacaggcgtgagccatcttgcccaaccctgagcacataatttaaaaatacatacatttttggagacatgagattctaccctgttgtccagactggtcttgaactcctgggctcaagtaatcctttggccttggcctcccaaagtcctgggattacagatgtgagctaccacgcccagagcatgttggttatttttataaaatcttaatgttgtatatatatatataaaattttcatttgaaaactatgtacaaggtagaccaatggattttaatgaaacattgcaatttcttgtgcttttagctttcatattacaaccaacctttaggaaacaactacggtcctctgtcatttaatgacagggatatgttctgagaaatacatctctaggtgatttttttttttttttttaaatggagtctcattcttttgcccaggctggagtgcagtagcacgatctccactcactgcaacttccgcctcctgggctccagcaattttgcttcagcctcccgagtagctgggattacaggcacacaccaccatgccttgctaaagtatttttagtagagacagagtttcaccannnnnnnnnnnnnnnnnnnnnnnnnnnnnnnnnnnnnnnnnnnnnnnnnnnnnnnnnnnnnnnnnnnnnnnnnnnnnnnnnnnnnnnnnnnnnnnnnnnnnnnnattttttaaatagtaaaaatctataaatattgtcatgccaaaataaaagattgattcacctcaggtgatctgcctgccttggcctcccaaagtgctgggattacaggtatgagccactgcacctggccaattttggtcttgtgtgactatcctagaatgtactaggtttgtgtaaacctagatggtacaggttgaatatcctaaatctaaaatccagagctgggcacagtggctcatgcccgtaaaccccagcactttgggaggccaaggcgggcagaccacctgaggtcaggagttccaagaccagcctgaccaacatggtgaaaccccatctctactaaaaatacacaattagcatggtgtggtggcagatccctgtaatcccagctacttaggaggttgacgcaagagaattggttgaaccccggaggcggaggttgcagcgagtcgagatcacgccattgcactccagcctgggcaacacaagcaaaactctgtctcaaaaaaagaataaaatccaaaatgttccaaaatctgaaactttgaatgccaatgtgatactcaaaggaaatactcatttgagcattttggattttgcatccttggattaaggatgcttaggtggtgagtataatgcaaatattccaagatccaaaaatatctgaaatattttcagtcccaagtatctctaataaggtgtagtcaacctagatgtcctactgcatacctaatcactatggtgtatcttattgcttataggctacaaatgtggacatcatgttactgtactgaatgctgtaggraattataacaatagttaagtatttgggtcttcaagcatagaaaagctactgtaaaaatgcagtataaaaaaaaatgatgccgggcacagtggctcacacctgtaaacccagcactttggtaggccaaggcgggtggatcacctgaggtcaggaattcgagaccagcctggccaatatggtgaaacctctgctctcctaaaaatacaaaaattagctgggtgtgttggcgcatgcctgtaatcccagctacttgggaggctgaggcaggagaatcacttgagcctgggaggtggaggttgcagtgagctgacgttgtgccactgcactccaggttgggctacatgaacaaaactccatcttaatgaatgaatgatgtacctgtattgggcacttaatatgaaccatgaatagcgcttgcaggactggaagttgcttgcaagtcagtgaattggtctgagcaagtgaatgtgaaggcctaagacattactgtatactactatcaactttatgaacactgtacacttaggcgaccctaaatttatttttattttttactgcaaaacggggtctctgttacccaggttgaaatgcagtgctgtagtctcagcttgctgaaacctccgcctccctgtttcaagcagtcctcccacatcagcctccagggtagctgggaacacaggcacgatccagcatgtccagctaatttttagtaactaaatttattctttaaaacttaaatagaacttagcttatggtaactatattaactttttaaacttttaacttaattttaattttggttttggttgtttttttgttttttttagacggagttttgctctgcctcccatacaggctggagtgccgtggcacaatcttagctcactgcaacctctgcctcccaggctyaagctattctcctgcctcagcctcccaagtagctgcgattaacaggtatgtgccaccacgcccagctaatttttgtattttaactaaagatagtttcaccatgttggccaagctggtctcgaactcctgacctcaggtgatccacctatctcagcctcccaaagtgctgggattacaggcatgggccactgcatcaggccattaattgtaattttttttattcatttcaagacagggttaagaaactgctaattttgtatttctggtagagacaggrttttgccatgtttcccaaaacagtctcaaactcatgggctgaagcaatcctcccgcctgggcctcccataataaagtgctgggattacaggtgttagccactgtgcccagccgccaaatttttagctttttaactcgtaataacatggcttaaaacacaagcacactgtagagctgtacaaactttttttttgagacagagccttgctctgtcacctaggcttgagtgtactggcgtgatcttggctcactgcaacctccacctcctgggttcaagtgattctcctgtctcagcctcctgagtagctggtattacaggcatctgccaccacgcccaggtaatttttgtatttttagtagagatggggtttcaccgtgttggccaggctggtctcgaactcctgatctcaggtggtctgcccgcctcggcctcctagtgctgggattacaggtgtgagccaccacacccagccttttcaaaattttctttatactttttgtataagctcttttttattaaatttttttttaactttttttcaaattgaaaactaaaagatgggcacagtggctcaccaaggtcaggagatgactggacacagtgcctcatgcctgtaatcccagcactttggtgggccaaggtgagcagtattgcttgagtccaagagttcaagaccagtacaacatgctgaaacccggtctctaccaaaagtacaaaaattagccaggtttggtggtgtgcacctgtaatgccagctacttgggaggctgaggtgggaggattacttcagccctgtctccaccccgcccccmcaaccaaaaaaaaaaaaaacagaaccaggaaaacattaaccttggcttccacgtagtcaggatcatcagtatcacttgtcttcctcctctacatcttgccccattggaaggtcaccaagggcagtaacacgcatggagctgtcatctcctgtgataacagtgccttctggaacacctgaaggacctggctgaggctgttttatagtttttgttttgttttgtttttgagacggagccccgctttgtcgcacaggctggagtgcagtggcgcagtcttggcttgccgcaacctatgcctcccaggttcaggcaattctcctgcttcagcctcccgagtagctgggacaacaggtgtgagccaccgcacccaagcctattttttaatttatttaaatttaaaaatattttttagttttttaaaaagtaggaagctgggcacagtggctcacgcctgtaatcccaacactttgagaggccgaggcaggcgaatcacgaggtcaggagattgagaccattctggccaacatggtgaaaccccatctctactaaaagtacaaaaaattagctgggcatggtggtgtatgcctgtagtcccagctactcgggaggctgaggtagaaggatcacttgaacccaggaggcggaggttgcagcgagctatcacaccactacactccagcctggcgacagagtgagacttcgtctaaaaaaaaaataagtaggaataaattaacgtacataaaaagcataacatactaaacacaaaccagtaacagtcatttatcattgtcaagtattatgtactgtatatatttttaagtcagatttgtaaaaatataaaactgccaatcttttctcattctcctggtaagtatttttcataaacatttatttggctgggtgcagtggctcacgcctgtaatcccaacactttgggaggccgagctgggtggatcacctaaggtcagaggtttgagactagcctggccaaaatggtgaaaccctgtccctactaaaaatacaaacattggtgggctcggtggctcatgcctgtaatcccagcactttgggaggccaaggctggtgaatcacgaggtcaggagttcgagaccagcctggccaacatggtgaaaccctgtctctactaaaaatacaaaaattagctgggcgtggtggcttgggcctgtagtcccagctactcaggaggcagaggttgcagtgagtcaagatcaagccactgcactccagcctgggcgacagagtgagactgtctcaaaaaaacaaacaaaaatagaaaagttaactgggtgtgatggcacgtgcctgtagtctcagctgctcaggagtctgaggcagaggttgtagtgagctgagactgcgcgccactgcactccagcctgggagacagtgagactcagtctcaaaaaaaaaaaattatatgaatgtaatgggttcatcattttaaaatgaagtatcttcaaaatttgtttcaagttctcatggaatcgatattgataaatatatcttggtattcttcagtttttaaggttgtaaaaataaatacttttttggagatagggtctctctcacccaggctggggtgcagtggtgcgatcttggctcactgcaacccctgcctcctgggcttggacagtcctcccactctagccgcacaagtagctgggaccacaggcccgtgccactggcctgctaatttttgtattttgggagtttttttgtagataatagggtttcgccatgttgcccaggatggtgaactcctgggctcaagcaatctgcccacctcagcctctcgaagtgttgggattacaggggtgagccgctatgcccggtcccaaagtcagtctctaacctaatctctgaaatgatgtgtcaattttgctactttctatttgctagaagtgagtcacagaattccagcccatactcaagggggttatccaagggcataaatattaggaaatgtgctttttaaaagtttctggaggctgggtggcgtggcttacgcctgtaaccccagcactttgggaggctgaggtgggtagattacctgaggtcaggagttttgagaccagcctggccaacatggcaaaaccttgtgtctactaaaaatacaaaaattagccaggcacggctgggcacggtggctcaatcccagcactttgggaggctgagacaggcggatcatgaggtcagaagatggagaccatcctggctcatatggtgaaaccccatctctactaaaaaatgtaaaaaaaaaaaaaaattagccaggtgtggtggtgggcgcctgtagccccagctactcgggaggctgaggcaggagaatggtgtgaacccgggaggcagagcttgcaatgagccaagatcgcgccactgccctccagcctgggcgagagagtgagactctgtctcaaaaaaataaaaatgtgtatctctgtcattgggattcctataagcttgtgcctagacaggatagttattttatctttaagaccctgttaaagcctgcctgaggtcttatctgcattcccctgtgggctgactcagcacctggttgccttgtattctcctgattatgaatctttcaacctctaggacatggaccattaacgtttagtatacttggctgtagctactttaagcttagatatctgccttcgaatattctaccttttttaaaataaaatataaatgtctagtgattctttcgttgttgtttttattktttggagacacggtcttgctgtgccacccagactcgagtgcaatggtgtggtcacagctcactgcagccttgaccttctgggctcaagtgatcctcccacctcagcctcctgagtagctgggactgcaggcgtgcaccaccatccttggataattttttattttttagagaaatgaggtctccctgtgttgcccagtctggtcaggctcaagcaatcctcccatgtcagcttcccaaagtgctggattacaagcataagccaccatgcctggctgtatcctgctttctgttataatagagtggattttgtcatcttgatagcccacacaacgttggtccgtttctttgatgatattatgctaattggacctgacaagcagaaaataataaacatcctacaagacttaataaaacacatgcatgacgggatgggaaggaaatcttgaataaaaattcatgattgaccacattcgtaaggtttttagggtctgattgtagtcttgtgtatattgtaccatctaccacaaagagaaatgtttgatgagcctgtgtgaagtttggagggaacatacaccatctatggacatgccaccttatggacgtgtcaccctaagcaatttatcaggtaacacacacacagctctaatttcttttttttttgagatggagtctcgctctctcgcccaggctggagtgcagtggccccatctcagctcactgcaagctccgcctcctgggttcacgccattctcctgccttggcctcctgagtagctggggctacaggcacccgccaccacacccagctaatttttttgtattttttagtagagacggggtttcaccatgttagccaggatggtctcgacctcctgagttcgtgatctgcccgcctcggcctcccaaagtgctgggattacaggtgtgagccaccgcacccggcccacacagctctaattttatgtgaggcctcaagcaagcaaaggctccacagcaggaccaggctgtggtgcaagctgccctgccccttgggcctaatggcccagcaggcccaatggtacagggaatttctactgtgtgtgaaacctcttgcttttaggagaatcctagtaaaccccctatgaccttttctgacaagtacattccatttgaacacaaattgtaaaacctgaactgttgatgaatttgatgtcatctgattccaaaaaccataaaatttgactcatgcagcagcatttcattgttaaatgaaaatgtatatgtaagactagcccaagcagttcctgaggacacaattaaaacatacaagcggccgggcacggtggctcacgcctgtaatcccagcactttgggaggctgaggtgggcggatcacgaggtcaggagatggagaccaccctggctaacccagtgaaaccctgtctctactaaaactacaaaaaaattagccgggcatggtggcgggcgcctgtagtcccagctactcgggaggctgaggcaggagaatggcrtgaacctgggaggcggaggtggcagtgagccgagatcgtgccactgcactccagcgtgggcgacacagcaagactccatctcaaaaaaaaaaaaaaaaaaaaaatcaagtagcttgctcggggttccataacacctcttccttctgtttctctggctttccctcagtccacayataaggcttcatgagagaagacacgaatggatataaaccaatgggaataaaccaagacaagtcctggtttatgaattggtctgcacagtatactggctccagctggaagtattacatagcctcacttagagatgaccctaagagacagtgataaagccaacctcatatcttgctaccagaagcacatgagaataattcttttaagaggctttaaaatcccagctactcaggagggtgaagtgggaggatcccttgagcatcggagcttgagaccagcctggacaacatagtaggacactgcctcaataaaaaattaagtaaataaatagatagcttttgagttatctatactgtgatataatacaccacaccctttacaagagcaaattctggggcatgattaaatgaaaagcaaaggtagtacttcatagcatctgcaaactggcatagtgcagacaggcaaaaagcaatggtaaataactactggaacatatgtagaaaatgtcctgtttggcatctactgcagagtaggctctcaatcagatgggtaagatagctagtcctatggatgtcagcctttttccccagccaccctggtgcttaataggcccatttataaagtgccatggcaacaagaaaggaggtctgcatggacttctcactgaggcttctctgcccatgcaccaagagtcaaggctrtgctgggcccctgactgatcacaccattctccagggaaccaatgagcctcttggtggtagattgatacattggaccctttctacacagaaggagaagcaatttgtgcctttgggaatagaaacattccaaatatgaatttgcctgccagaaatggtcctgctggcactaagcagaaggcctattcattgctgtgatattccatacaaatcactaagcaacctgtctacagtgaaggacacgatgagagagaattacactgatamaatttactagcactaccacaagccccaaggacccagaagcatctgacttgacaaaatggcagaatgcctgctaacagcttagttactacattagctggagaaaattagctggaggattagaaggctgtcttacagaatgaatatatgacttaagccwgtagctaatatttggtgacgtctcccgcatagccaaataccgcatgaaccgaataaccaaggggtggaggtttggaatggcccctttcactttttccctttttattttaatttatttatttgaggagttgctgtgttacccaggctggagtgcagtggtgtgagcacagctcactgcaacctcaacctcccaggctcaagtaatcctcccacctcagcctcccaagtagctgggactacaaacatgcgccacyacccccagcttatttttgtggttttagtagagaaggggtctcactatgttgcccaggctggtctcctactcctgggttcaagcaatcaacctgccttggcctcccaaagtgctyggattacaggtgtgtgccactgcacccagccaacattttccctttttaaagaaaagaaacataattcagacatacatataaagcatacaattcagtgatatttttttagtatatttataaagttgtacaaccatcaacactatctaatttcagcagattttcatcatctccaaaagaaactccatatccattagcagttcactttccattcacaccaccctacccctagcacctgacaaccactaagctactttctgtctctatcaatttacatattctgtgcattttatattaataaaatcatgtaatatgtgaccttttgcatctggctcttttcatttagcataatgttttcaaggcttatctgtgttgtagtatgtatcaatatttcattccttttggccaggcatggcagctaacgcctgtaatcccagcactttgggaggccgaggtgggaggatcacctgaggccaggagttcaagaccagcctggccagcatggtgaaaccctgtctctactaaaaatacacaattagccaggaatggtggcacatgcctgtaatcccagctactcaggaggctaaggcaggagaatcacttgaactcgggaggtagaggttgcagtgagccgagatagcgccattgcactccagcctggcgacagagtgagactccctctcaaaaaaaaaaaaaaaaaaaaaaaaagaaaagaaaacacaacttcttcctttgctatgctgagggcctactgatgggcaagttttagcacacatttttaggaggcttagctacaactacatttaattacaatgacttggaggagtcccacttttctggccttctcataccagatgaaattccaaaacccgggctggatgcagtggctcatgcctgtaatcccagcactttgggaggccgaggtgggtggatcacctaaggtcaggagttcgagaccagcctggtcaacatggtaaaaccccatctctactaaaaatacaaaaaattagccgggtgtggtggcgagtgcctgtaatcccagctactctggaggctgagacatgagaatcgcttgaacctgggaggcggaggttgcagtgagccgagatcgcgccactacactccagcctgggcaacaagagcgaaactctgtctcaaaaaaaaaaaaaaaaaaaaaaaaatatatatatatatatatatatatatatgtatgtatatatatgtgtatatatgtatatatgtgcatatatatgtatatatatgtgtagatatatgtatatatgtgtatatgtgtatatatgtatatatgtatatatgtgtatatatgtatatatgtgtgtatatatgtatatatatgtgtatatatgtatatatatgtgtatatatgtatatgtgtgtatatatgtatatatatgtgtgtgtatatatgtatatatgtgtgtatatatatgtatatatatgtatatatatgtgtgtgtatatatatgtatatatatgtatatatatgtgtgtatatatatatgtatatatatatattagctgggcgtggtggcaggctcctgtaatcccagctactcgggaggctgaggcaggagaacgcttgaacccaggaggcagaggttgcagtgagccgagattgctccattgcactccagcctgggcaacaaaacaagacgccgtctaaaaaacaaaaaaaattccaaaagctcctgtggrcagaaggattcttccccagctttttkctgtcttggcttatctctgttgctgacctgctgtcttaaccactgccctccagttgccgcatgcctgttgatgataagagtgtcctggcacatgatcagtaagcaccttcaggaggctggtgaggcttatcggtctcagcctgctgctgccacgaccccctggactaggcctcaggcaaccggaatttaagcytctgcaacatckagaagcataagttctcttcttcagtttcttcacctataaaaaaaacagagtttcactctacgatttttaaagtttgttgtatcatctaattccaaagggattaggccttcagaagatgacgtggaaagttcaaaagaaattaaaaatcatctaaaatcccatccattagcagtaacaatgattaatatctggctatatgtcaaatagctcgtgtctagggcccattccaaagctctaagtttcttctcacggatgcagtggacatttgtgtaagtttacttcacttcagttacactggccttttttgcagccctcaagtgttctccttctttttttttttttttttgagatggagtctcactctgtcgccacgctggagtgcaatggcacgatctcagctcactgcaacctctgcctcccgggttcaagcgattctccgacctcagcctcctgagtagctgggattacaggcacgcattcatcatgcttagctaattttgtatttttagtagagacggggtttcaccatgttggtcaggctggtctcgaactcccgacctcaggtgatycgcccacctcgcctcccaaagtgctgggattacaggtgtcggccactgtatctggccctcaaatgttctaagcagactctacctcgaggcctttgcacagacttatctgtctgtctggaacaatatctgcctagatagctacatagacactcccttcatacaggccccaaatgtcatttttcagagataccttctctggccacctgatacaggttacacccgcatccttgggctgatttattttttctcacagtgtctaacacaatcctcagtggaggattaataagtttatytgtttattgttctctcctactagaatttaaatttaaatctatgaggacaggaactttgtttttttgtttgtttgtttgtttgagatggtgtctygctctgtcgcccaggctggagtgcagtggtgcgatctcctctcactgcaagctccacctcccgggttcaagccattctcctgcctcagcctccccagtagctgggactacatgcgcccgccaccacgcccggctaatttttttgtatttttagtagagacggggtttcactgtgttagccaggatggtctcgatctcctgaccttgtgatccccccgccttggcctcccaaagtgctgggattacaggctgagccaccgcacccggccggaactttgtttttttttttccaagtggctacttttatttatttgaaaaaaacaagccccagagctgccaaggggctgccttctctgtcttgtggagacagtgcttgatcctggagagcagccatgttgaraaaaagatattttgagccctaaaataatgagaaaacaggacagagagaggtgttctgagccagttccagattttgccaactgttgcaagaactctagaatctttatgttagtaaaatgccaaaaataaaagtctgcattgaaagaacgtctaaccacttactataatccaaccttttaggaagaatgcaaaatggcatacatgaagaagagggaagaatccagaaaaactggaattcctacaaagaaaagtctatagaaacgtcccaaaagcaagtaagcaaacagataacactcaggacctctcatattcatggaagtcatttatagtataaatccccttaaataatggactcaggaggccgggtgtggtggctcacacctgtaatcccagcactttgggaggccgaggcgggcggatcacaaggtcaggagatcaagaccatcctggctaacatattgagaaggagtctttctccttcacccagactggagtgcagtggcaccatctcagttcactgcaaccttcacatcccaggtttaagtgattcttatgcctcagcctcccaaatagctgggattacagacatgcaccaccacgcccagctaatttttgtgtttttagtagagatgaggtttcgccatgttgtccaggctggtcttgaactcctggcctcaagtgatccgcccacctcagcctcccaaagtgctgggattacaggcatgagccaccgcgcctggcctgctctgtaactttaactcctggtgtattccttgaggtctgttgaagtctggatcacagaccattgtgggaggtggcaactttctaatgcattaattagattgaaagatttgaaagaaaaagtttacatttttttttcctgggattacatcaaattaaataacctctgcacaacaaaggaaacaatcgacaaaatgaaaaggcaacctatggaataggagaaatatttacaatctgtatatctgataaggggttaatatctcaamattttttttcttttttctttatttttcttttatgtccacttccaagctcaaatatctcaaatattatgtaagaaactcacatagctcaatggcagaaaaccaaataacccaactgaaaaatgagcaaagacctgaatagtccttttaccaaagaagatacacaaatggccaacgggtgtatgaaaaggtgctcaacatcattaattatcagggaaatgcaaatcaaaactacaatgagtatcacctcacacctgttaggatggctattataaaaaaggcagcagccaggtgcagtggctcaggcctgtagtcttagcactttgggaggctgaggtgggtgggttgcctgagctcaggagttcgagaccagcctgggcaacatggcaaaaaccygtctctactaaaaatacaaaaaattagctgggtgtggtggcacatgcctgtgaccccagctaggaggctgaggcatgagaatcgtttgaacctgggaggcagagattgcagtgagccgagattgagccactgcactctgtgactctgtctcaaaaaaaaaaaaaaaaaaaaaggccaggcacggtggctcatgcctgtaatcccagcactttgagaggctgaggtgggcggatcaccggaggtcgggagttcgagaccaacctgaccaacatggagaaaccccgtctctattaaaaatacaaaattagccgggtgtggtggcrcatgcctgtaatcccagctactagggaggctgaggcaggagaatcacttgaacccgggaggtggaggttgcggtgagccaagatcgtgctgttgcactccaacctgggcaacaagagcgaaactccgtctcaaaaaaaaaaaaaaaaaaaaaagtaactctgtgatgtaaagaatatatcaattagtttggttgtggtaatcatttcacaacgtgtaccaaattttgatgttgtacagcttaaatatatataattgttctcaattatgccttaataaacctgggaaaaatttttcctgaaggtttatgaatttaaaatgaaaacacacacgaggccgggtgtggtggcttacacctgtaatcctagcactttgggaggccaaggtaggaggattgtttgcggcccagagttcaaccaacctgtcaaatatagggagacctcatctctattatttatttatttatttatttatttatttatttatttatttttattttttatgagacagagtcttgctgtgtcgcccaggctggagtgcagtggcacgatctcggctcactgcaacctccgcctcccaggttcaagcgattctcctgcctcagcctcctgagtagctgggactacaggcgcccgcctccacgcctggctaatttttcgtgtttttagtagagacggggtttcaccgtgttagccaggatggtctcaaaagcatgacctcgtgatccgcccgcctcggcctcccaaaagtgctgggattacagcgtgagccaccgctcccggcatatttatttatttatttgagacggagtttcacacctgttgcccaaaatgggagtgcaatggcgcgatctcagctcactgcaatccccgcctcccgggttgatgcgattctcctgcctcagcctcccaagtagctcggattacaggcacatgccaccacacctggctaattttgtatttttagtacagacagggtttcacaatgttggtcagatggtctcaaactcctgacctcaggtgatccacccatctcggcctcccaaagtgttgggattacaggcatgagccaccgcccccggccctgtattttttataattaataaaataaaatgaaacgaacaggagtatacgttagaacagaatgcaaatctgcacaaaaaatttaagataaaactggggcatataaagacatgttttagccaagcatggtggctcacaacttaaaatcccagcactttgggaggctgaggtgggaggattgcttgaacccaggtgttccagactagcctgggctacatagtgggacgcccccctccccccatctctattttttaaaaataattttaaggccgggggcagtggcttacgcctgtaatcccagcactttgggaggccgaggcaggcggatcacgaggtcaggagctccagaccaccatggccaacatggtgaaaccctgtctctactaaaatacaaaaaattagccaggcgtagtggtgcgcgcctgtagtcccagctactcaggaggctgaagcaggagaatagcttgaacccgggaggcggagattgagccgagatcgcaccgccgcactccagcctggcagcagagcgagactcagtctcaaaaaaaaaaaaaaaaaaaaaaaaaagacaggttttgcctggagtgcaccctataatggtcgagagggaagcacattcactctttaaraaggaaggccctaaggagaaggcacttcactgggaaagctggaagatgggggtgcttacagcagaggagcaggaggaaggaagaaagaaagagcaaataacccgggccacaraaagccaaragttttggctgttgcagtccacagtattatcttgttcctagtattagcttgctcctagttccacaacatcaacaatggagcatgaaaatgtaaacacctaaccaaatatttgcaccttttggatgatttcccacttctaraaaatgaaaaatatttggttgtttacagtccccatccatttatctgttcccttccttccagttttttgctaaracagtgggacaccctggctggagagcaatattcagtttatagcttgattttgtttacccctgagaccaaggacaattttatctatgtttttaaaggcagaagatagaaataaaatctaaataacttgtccttgagcctgacctaaagcctagacagtggaacagaattcgggaktaaggagcctggagagggtggagtaagtttattcaaattaataaatgctaaatcagaattatttaaaaaatttaggcagatgattactcactctccctgtctttggaatgttttagagaggtattaatgaacaatcttattagcacagaccaggactcttcttgattcaattgcatgaaattgaaaagaatttaaagatactttctcatgtgatttcatgccttttccttatactgatgcccacatgttgtgaaacatataattctcgcaacaagcctgtattataatcctgttttagatgaagacagctgaggccaagaagggttatataatttgcccaggccaggtgcggtggctcatgcctgtaatcctagcactttgggaggctgaaaagggtggatcacttgaggccaggggttgagactagcctgggcaacatggtaaaactctgtctgtactaaaaatacaaaataaacaaattagctgggcgtgatggcccgcacctgtagccccagttactcaggaggctgaggcaggagaatcgcttgaacctgggaggtggaggttgcagcgagcagasatcacatcactgtactccagcctgggcaacagagcaagactctggccactccaccccaccctscaaccaaaaaaaatcaaaaatcaaaaaagagataaaaataatacataaaataatttgcccaaagacacatggatgacaagtgtcagagtcaggttataaacacaggcaagaagataacactgcctcacactgctattttgtgtattttgaagttacgagtaagaaaggatgtctcctatacttcattaacttttttttttttttttttgagacggagtctcgctctgtcacccaggctggaatacagtgatgcgatctcggctcactgtaacctytggctcccgggttcaagckattcccctgcctcagcttcctgagtagctgggactacaggcgcctgccaccacggccagctaattttttgtatttttggtagagatagggtttcaccctattagccargatggtcttgatctcctgacctcgtgatctgcctgcctcagcctcgcaaagtgctgggattacgggcgtgagccaccgcgcccggccttcattaactttttactcattcttcagcaatcatacattgatgaaggaactgaaaagggggtaagaaggttgtgtgaaaggaaaataaatcttggcgtcccaaaatcactaagctaaaaggaaaaaaaaaagtcaagctgggaactgcttagggcaaacctgcctcccattctattcaaagtcatccctctgttcactgagataaatgtgtatctgattgcctcctttggagaggctagtcagaaactcaaaagaatgcgaacatctgtctcttatctacctataacctggaagcccccttccctcttcttgttgtcccggttttccttctagttgtcccacctttccagatggaaccaatgttcatctacatatgttgattgacatctcctgtctccctaaaatgtgtaaaaccaagttgtgctctgaccaccttgggcatatgtcatcaagacctcctggctgtgcacctgtaatcccagcactttgggaggtccagatggcagatcgcttgaggccaggagttccagaacagcctggccaagatgatgaaaccctgtctctactaaaaatacaaaaattagcccagcatgatggctcacgtctgtaataccagctactcaggaggttgaagtaggagaatcgcttgaactcaggagttcaagtggaggttgcagtgagctgagatcatgccactgcactccagcctgggtgacagagtggagactccttctcaaaacaaaacaaaccttctgaggctgtgtcatggacacaggaccttaacttcctaaattgactgagatctgtctcagatttgggggttcccagttctaattccatatgctcccattctgaagtctccctaaaaaatgtttcttctcgtttgaagatggcttttgattattttatttttctcacttgtaagacaacttactcttgatgttaaaaacatcttactcggccatacacagtggctcacgcctgtaatcccagcacgttgggaggccaaggtgggtggatcacctgaggtcaggagttcgagaccagcctggccaacatagtgaaatctcatctctactaaaaatacaacaattagctgggcatggtggcacgcacctgtagacccagttactcggcaggctgaggcaggagaactgcttgaacccgggaggcggaggttgcagtgagccaagattgcgccatttcactccagcctgggcaacaagaaaactcaaaaaagaaaaaaaatcttactcatcttgtagggagggaaagaaccctttttcttctgccctcctggggtgggggctgcaaattaaactgaaaaaaaccagaytgacatgtaaacatgtggaaactcagtgataaacaatgccatcaaaggagtggttagaatttgggtttaacaaaagaataagaaatttgtaaagaagtgaggagacaaaggtgaaggtttcaggcttccaggggtagcaaactgggaagaaacaaatggaagatcagggttgttttagtaaggtttcttatgcagattcttctcagtcttcctggacagagtctagagttttcaccagtgattatcaatctaagtctgtttttaagcaaatgaaggaaagagtaggccttgcctgcctgcttgtctgtctgtctttctttcttttccttctttctttctttcttttctttctttttctttctttctcttttcttcctttcttcctttctctttyytttctttctttctttctttcctctttcttctttccttcttttccctccctccctccctcccttccttcgttcmttccttccttccttccttctctctttctctctttctttgcatctgctgttcctgaatcatcttcagctcaaaacagtccttatttaggggtggcatattctgatcccctacaatataatttaacagaaactgtataatcagagaaactgtataatcagaaccatttcttctggacagtattataaactaactgcaaaaagtaaaaacagaaattatttcattttgttttgaacattcagaatatagtgttctagcagggattatgtccatgagcaaatcagtaaataatttggagctgtgataaaaatgataaaaatgtctctcttcctcaaaaaaaaaaaaaggttaagaattaaaaggcaggccgggggtgagccgcagctcatacctgtaatctcagcactttggaaggccaaggtgagaggatcatttgaacccaggagtttgggatcagcctgggcaaaatagtgagaccctgtgtcttctaaaaatatatattgtaggccgggcacggtggctcatgcctgtaatcccagcactttgggaggccgaggcgtgtggatcacttgaggtaaggagttcgagaccagcctgaccaatatggagaaaccccgtctctactaaaaatacaaaaattggccgggcatggtggcttgcgcctttaatcccagctacttcggagactgaggtggaagaatcacttgaacctgggaggcagaagttgcaatgagccaagatcgtggcattgtactccagcctgggcaacagagtgagactccatctcaaaaacaaaaacaaaaacaaaacagacacacacacacacacacacacacacacacacacacacacatatatactaaataaattaaaagaaaaaaagaattgaaaggcaatctccatctcacatagaggactgggccttgatgtataaagaacatgaggaacaatgcacatgtccatcagctggtgagcaaataaacaaaaggtggaaaatgtatgcattggaatattattcaacaatgaaaagaaatgaagtacttatacaacctgggcgaaccttgaaaacattaattatggtaaatgaaaaaagcagtcacaaagtgttacatattgtctgattccatttatatgaaatgcccagaataggcaagtctatagacccagaaagtagatttgcggtttcctagcgcttagggcaggaagggttggtgaaaggattgggggtgacagccaaagagtatgtggtttcttttggagatgataaaaatagtctaaaattgactgtgatgatggatgcacaattctatgaatacactaaaaaccattgaattgtatgctttaaatggacgaattgaatgattctgaatcctatctcaataaagctgttaaaaaaaaggttttatgggccgggcatggtggctcatgcctgtaatcccagcactttgggaggccgaggcaggtggatcacgaggtcaggagatcaagaccatcctcgctaacacagtgaaaccctgtctttatgaaaaatacaaaaaattagctgggcatggtggcaggcgcctgtagtcccagctactcgggaggctgaggcaggagaatggcgtgaagctgggaggcagagcttgcagcgagccaagatcatgccactgcactccagcctgggcgacagagcaagactccgtctcaaaaaaaaaaaaaaaaaggttttatggctgggcttggtggctcacacctgtaatcccagcacytttggaggctgaggtgggaagattgcttgagyccagaagtttaagaccaaacaaaacaacaaaaccaaaaaagccagacccagtggtgcccaagtgcctgtagtctcagtgactcaggaggctgaggtgggaagatcacttgagctcaggagatggaagctgcagggagctgtgagggcaccactgcactccagcctggatgacacagagagatcctgtccccaagaaaaaaaagtttcgtataatttaggtaattgttagtaagagtgaaatgacatttgttggtgttaactatcaaatctgaaagaagatcagaaaattaaactgttgatcaagtaaagctgagtttagattcacggcagcaagggagaataccaccttaacagaatcttagttgtgtctcagaagagggaactgtgtctgcacacacacacttacacataggctaaaaaactgtgactaggccaggcrtggtggctcacacctgtaatcccagcactttaggaggctgaggcaggtggatcatgaggtcaggagttcgagaccatcctggctaacacggtgaaaccccatctccactaaaaatacgaaaacttagccgggcgtggtggtgggcatctgtgggcccagctacttgggaggctgaggcaggagaatcacttgaacctgggaggcggargtttcagtgagccgagattgtgccactgcactccagcctgggcaacagagcgagactcttgtctcaaaaaaaaggaaaaactgtgactagttcttgtttatacgattggggcaaagaagtttctccctcgcctttgggaagtttgctgaaaaatcacctaataataaggcagattgagaggaaaagcatacaaattaacttgaccatgcacatggagaaaaccagtgtgattgctcaatatcccaataggacacaaataataataataattattattatttttaattttttgagacasagtctcactctcttggccaggttggagtgcagtggcacaatcccagctcaccacaacctccgcctcccaggtttaagcaattctcctgtctcagcctccagagtagctgggattacaggcgcccgacaccacacccagctaatttttatatttttagcagagatagggtttcaccatgttggccaggctggtctccaatgcctgacctcaagtgatctgcccacctggacctcccaaagtgttggaattayaggcactagcctcagcacctggccccaaacacttatataacctcttttcagaggggtgggggagatggggaatataggtagttcagtagaggggcattaagtgatgatttaggtgaataaatggatgggggaacacagattgacttgcaaatagttttctttggaagttaaatgaacctgagagacagacattattttgcaaaaggattgggcctgctctggttaccttcctcaccttctttcctgcaatagataatgagataacagggaagggaagaaaaagcaattgttctcttgggggctctgggtctttatgtagattggggaaaaatctcttccaaggcctgataatctctaagagtttttattttatttatttatttattatttwwtttwtttatttatttatttatttatttatttatttatttatttattttcagacagggtctcactctgtttgttgcccaggatggagtgtactggctcccttgaggctcattgcagcctccacctcctggatcaaaggatcttcccacctcagcttcccgagcagctgggataacaggtacacatcaccatgctcggctaatttttgtatttttttggagagacggcatttcatcaagtttcccaggctagtcttgaactcctgggctcaagcaatctgcatgccttggcctcccaaagtgctgggattacaggcatgagccaccaggcccagattatttatttatttatttatttatttatttattatttttattttttgagacggagttttgctcttctcacccaggctggagtgcaatgacggggtctctgctcactgcaacctccgcctcctgagttcaagcgattctcctgcctcagcttcccgcgtagctgggattacaggtgcccaccaccacgcccagctaagttttgtatttttagtagagacagggtttctccatgttggccaggctggtcttgaactcctgaccttaggtgatctgcctgccttggcctcccaaagtgctgggattacaggcgtgagccaccatgcctggccaccaggctcagtttctaagaattttttgtttgtttgtttgtttgttttgagacagggtttcacttctgtcatccaggctggagtgcagtggcgcgatctcggctcattgcaacctccagctctcaggcggctcattgcaacctccagctctcaggctcaagcgattctcctaccttagcctcccaagtaactgggactacaggcgcacaccactgcacacagctaatttttgtatttttatttttattttattttattttattttattttattttatttttctgagattgagtctctctgtgtcacccaggctggagtgcagcagcgcgatctcagctcactgcaagctccgcctcccaggttcatgccattctcctgcctcagcctcctgagtagctgggactacaggcgcccaccaccacacccggctatttttttgtatttttagtagagatgcggtttcaccatgttagccaggtctctatctcctgacctcgtgatctgcccgcctcggcctcccaaagtgctgggattacaggtgtgagccactgtgcccggccttttgtatttttagtaaagatggggtttcgccatgttggccaggctggtcttgaactgacctcaagcgatcttcccaccttggcctcccaaagtactgggattacaggcatgagccaccattcacagaagagtgtttaattcaaaatattcattatacaagggagtcatattttggggtgaaatttccttttctccttcaatacaataattaaaagaaggaatactgttgttacttttatggtttagtcaatttacattttcagtgggttactgtgtaattcaataaaattattaatccttaaaatacatttgttggccggacgctgtggcttatacctgtaatcccagcactctgggaggccgaggcgggtggatcacctgaggtcgggagtttgagaccagcctggccaacataaagtgaaaccccatctctactaaaagtaaaaaattagccaggctcagtgaagtgggcctatagtcccagctactcgggaggctgaggcagaagaatcgcttgaacctcctgaaaagcggaggttgcggtgagccaggattatgccactgcaattcagcgtggtccagagtgagacaacgtctcaaaaaaaaaaaaaaaaagtcaactgtrttaggtattataagtaatccagagaggatttaaagtatataggaggatgtgcataggttatatgcaaatactacaccatcttatataagagatttgagcactcacagattttgttattcaaggaggtgctggaaccaatctcccacagatacatagggaacgacgatgttctggctttgttatagttcacgcatctatcttcccgtttattcaactcaaaaattattagacatcttttgtgtacctacctctgtgttagagcagggcatacagcagcaaataagataatgtccctggttttagataagttaaaatttagcaggaaaaacaggtattatattttacaaattaaatctcatatttttaagcatattttaacaagaaaaaaattckctgtgaattccattgtaacgttttacatataaaactctccctcttaagtctctaaacttttttttttttttttgagacggagtctcgctctgttgcccaggctggagtgcagtggtgcgatctcagctcacygcaacctccgcccctccaggtttaagcaattctcctcctcagcatctagagtagctgggattacaggcgtgtgccaccacgcccagctaattttttttgtatttttaatagagacggggtttcaccrtcttggccaggctcatcttgaactcctgacctcgtgatccacccgcctcggcctcccaaagtgctgggattacasgcgtgagccactgcgcccggccttaagtctctaaatttttaaaaaatgcatttaatactaaggtctcaaacagttttctakacatgtaaatcaaaaacccrtttaattaattaagatcctggggggaaaaaaaggttacttgctgaacaaaatgaagtttacttataggaaatagcactataggaaagtagacagcatttttcaggagttgtccatgaatgtatctttttttttttgtaatttaaaaaaatacaaaaaagtacgtagaataataaaacacacctgctggagaaatggaactaaaaacaaaatctccaataagtctttccacaaagatagtagaaaaataattttattattgaataagcattaaatcaaaatgtgatattcaccacaggcaatccactaagagattacaaaacagaatgtaatctgttttgtaaaagtctcccttttatgtagctaagcagacacaacccttaacatagatgttcttgagataagctgcaagtcctaagtaagctgacctgacagcactatttgtaacaaatagttcattctaaattcacctggtaattaagggtgaccatctgtggtaattggtaaagttasctgaaaggggtcctgattcagaccccaagaaagggttcttagctctcgcacaagaaagaattcgggatgagtccatagggtaaagtgaaagcaagtttattaagaaagtaggccaggcacagtggcttacgcctgtaacctcacaactttgggaggcygaggccagcggatacgaggtcaggagttcgaggctagcctggccaacatggtgaaaccctgtctctattaaaataacaaagattggcccagcctggtggtgtgtgcctataatcccagctaattccaggaggctgaggcaggagaattgcttgaacccgaaaggcagaggttgcagtgagccgagatcacaccattgcactccagccttggcaatagagtgagactctgcctcaaaacaaaacaaaacaacaaaaaaagaaagtaataaagaatggctaccccataggcagagcagtagcatgggccactcagccacttaaacttattgttacttcttgattatctggtaaaccagaagtggattattcatgagttttctgggaaaggggtgggtaattcccagaactgagggttcctctcctttttagaccatgctgggtaacttcctgatgttgccatagcatctgtaaactgtcatggcgctactggggctgtcttttagcatgctaatatattataattagtgtatagtgaacagtgaggatgccctgaggtcactctcattgccctcttggttttgctaggttttagccggcttctttactgcaaactgttttatcaacaacctgttctatggtctgtatcttgtgctgacctcctatctcatcctgtgatttagaatgccttawcctcctgggaatgcatcccagcaggtctcagcctcattttacttagcccctattcaagatggagtcactctggttcatacgcctctgacagtgttacataaaggaaaaataaacttctcctatctgtatgggttttttttgttgttgtttgtgtttggttttttgttttgttttgtttttgtttttaagacagggtctcactctcactcagactggagtacagtggcatgattacagctcactgcagccttgacctcctgggttcaggtaatccttccatctcagcatcccaagtagctaggactacaggggcgcatcaccatgcccagctaattttgtatttttcatttttgtacagacgaggtcttgctatgttgcccaggctagtcttgaactcctgaatgaaagtgatcctcctgctttggcctcccaaaatgctgggattatagctgtgagtcattgcgccaggccaacttctcatacctttgtgagaggaggtagtttggcaatttggagcaacattctcaccaacgttaggctcctgcctcccacgggaactggtgctgtaggagttattaagaaattattttaggtatatagagaagaaaaggggtccttgggaagttttcgggtttttttgtttgtttgttttgttttgttttgagagggagtctcgctctgtcgcccaggctggagtgcagtggcgctatctcggctcactgcaagctctgcctctcgggttcacgccattctcctgcctcactcagcctcccgagtagctgggactacaggcacccgccaccacacccggctaattttttgtttttgkttttktttttkttttttttttagtagagacggggtttcaccgtgttagccaggatggtctcgatcttctgacctcgtgatctgcccgcctgggcctcccaaagtgctgggattacaggcgtgagccaccgcacccagctgggaagttttctttaaagcatcttcggaaaagtttcttgtatagccccggctcttagagccaggctggcaacctttgatatgtaaatgcaagccattagaaactaggtccacccaaacatggtgattcccctgccttcttgccctttccccacaagttcctggcaacatggccgcccccatgtattcccacgtgtgttagaacatcatggtgccccgcttttgcatattaaaaggctatggtgggagggccagctttttcgcagatatgtgaatgayatgcctagtcaaaccaatcccctgagccctatgcaattcagacaccgcctcctccagcctctgtgtacatatatctagctggtatctgtggcaggtcggggttcccctctctcagctttggagcccccctccctctgtctctttacaggggagcttgttcctcctcccttccttcttgcctcttcttgcctattaagctctcaagctctccactccttaaaaccactccacgtgtgtctgtgtcgttttatctaaactggcacgaggaccaagaaccctggtgttcctccactcatcggagctgtatcactggtagataggagcactgccatttttgatgcttacatttcaaagagatctcaagtccttgagaaagacattcctgggttttacacatttacaagaggcttttagaaagatttatatacatctggggccaggcgcgttggcttatgcctgtaatcccagcactttgggaggccgaggcggttggatcacgatgtcaggagatggagaccatcttggccaacatggtgaaaccccatctctactaaaatacaaaaaattagccagatgtggtggcgcgtgcctgtaatcccagctacctgggaggctgaggcaagtgaatcacttgaaccccggaggcggaagttgcagtgagctgagatagcaccactgtaytccagcctgggcaacagagcaagactccatctcaaaaaaaagaaaagaaaagaaaagaaagatttatatacatctcacaggggcagagagaatttacaatgacaaatcctctaaagaaaatgctttaagaaaagggaaagaatagtcttttccctaattttttctttttgcttttgtttgtttgtttagagacggggttttgctattgtaaaccaaaaggtatctgagacaggtcttaatcagcttagtttattttgccaaggttaaggatgtgcctgtgacacagcttcaggaggwcctaacgacatgtgcccaaggtggtcggtgtgcaacttgcttgtatacattttagggagacatgagacattaatcaatatgtgtaagatgtgcattggttcgttctggtaacgcgggataacttgaggcaagggcttccaggtcccacataggtaagagacaaaargttgcattcttttaaatccttgatcatctttccactgaatacacaatttaggctggctcagtgaatctgcatttttacataaacaatagggcaggggaagcaatcagatatgcatttgtctcaggtgagcctcctcagagggatgactgagttctgtctgtcccttgtccacaaggaatttccttctgggcaaattgtgagggaggtatgtagcttttttttgagacggagtcttgcttattcgccaggctgaagtgcagtggcgccatctcggctcactgcaatctccrcataccaggttcaagcgattctcctgcctcagcctcctgaataactgggattacagtcacgcaccaccacgcccagctaayttttatatttttagtggagacagggtttcaccatgttggccaggatggtctcratctcttgacctcatgatctactcgccttggctttccaaagtgctggaattactggcttgagccaccacgcccagcggtgtgtagctttttatcttttttttttttgagatggagccttgctctgttgcccaggctggagtgcagtatgcgatctcagcactttggggcgggggcaagatgaacagatcgcttgagttcaagasttcaagaccagcctgggcaacatgtctaaaccccatctccacaaaaaaatataaaaattagctgggcgtagtggtacccgcctgtagtcccagctactcaggaggctgaggtgggaggatcagttgagccagggaggcagaggttgcaatgagctgagattgcatcactgcactccagcctgtgtgacagagtgagaccctgtctcaaaaaaaaaaaaaaacttaaaatcttttttttaattctctcaatttcaatctcacttacttcttctttcaaagccaccactgtctgaacctggkgcccttccttctgattatagttttcgttgttgttactgtgttttgtttactttyacaattttggaatatgaaaatatctttcttttgtaacgacaaatatggaatacaaacattacaacttctttttttgcccatcctggattaaaaaggaaataatagatgaaatgccttgcaaagaggacaaaatattttggggtctaaaatgtgctttgcccaggatcttgccttgtaatgataatgactctcccttagtgatccaaacaaaggaatgtggtcaactgtatgaacaaggttcagtgaagtcctgagtcacatgacaatctgtcctccccaagcctctgtgcttcaraagctggaaagtcgttctacccttgggcacagggtacatgtgcagtagcaataaatagcaccaggaggaataggagcaacaagtgttactggtagagggtcttgactacgagttgtccaggtccttggcattttgaacaaagaattgaacaaaacgtacgaagtagcagagaaatgaaatgcaggaatgaagcaacgagagcaggaattcattaaagcgagaaagcacttcacagggtgggagtgggcctgagcaagcagctcaagggtgcagttacaaagctttctgggctttaagtacctcatttgaggttcttatctagatgaaggatttggtctgtggcaaattaaagactgaggtgaactggcgccctgtgcagataaagggatggtccctgcttcgccagggccaatccaaggcactctccttttccatcccagcactttgggagcctgaggcaggtgatcacttgagctcaggagttcaagaccagcctggctaacatggtgaaaacctgtctctactggtgctctcgccattattccatctgctatgagcccctttctgcataaagtaaagtttgccttgctaagagaattaaatttatgtttgaatgttatttctttgtagcactggggaacaagcattctatttctaaataaacatttttacatataagaaatggtggtccgtacagggatacattttcctctggggtggtctctagtcctctcatgagggggtctcccactgcctcatygtggtggcctcaggggtagtaagaaattgagacccatctggtgtgatgaatagacccggactctcaacaaggcagaagaaactggccagcaatctggagtaaatgatcctcacatatgatgtggaccaggcgacctcatgcatgagccaagaaaggaaacaaaccagaggagccgtacaccagcacctgcctggaaaccacatcctcatcaaaagatagaaagaagaaaaactcgaggcagcctaagaaccctaccttgtgctgctaaccaccgagactgccgttcgcacagcagaaaaggatagacacatcatacccaagtcaaaaaagcgtcatcaccatcaaagtyataggtcattgttccagggtcaagccctaccaagttaaagctaagaaaactttatctatcttttctttcctttaactactccccatcttattaatgtaactaaatctaactcacctcaaattattacttttaatgcctgttcagttatcactcctctcataccaaatgacaaaaccaaagtctttgtagtaaaagtaaaaaaatctaaagcaaaccacagcaattaaaacaagatatcaagatgtaaatgactagctaaaatacattaaatattctgtccgcactctaaataaaagcaattgttatgcttgtgcacacagtaggctagaagtccaagttatcccctttccactcagatagtcctctaatcgacaaggcatggactgcatggtagctccttttcttcttttgtctttttttcttttttttatctgagacggagtctcgctctgtcgcccaggctggagtgcagtggcgcaatctcggcttactacaagctccacctcccgggttcaagccattctcctgcctcagcctcccaagtagctgggactacaagcgcacgctgccaagcccggctaactttttttttttttttttttgtatttttagtagagacggggttttaccctgttagccaggatggtctcgatctccatctcctgacctcgtgatccgcccgtctcggcctcccaaagtgctgggatataggcgtgagccactgcacccggccggtatcaaaatcctgcagcctaagatagtaaagtgtgccaaactctctctactatttcctaaagtgcagtaccctgagggtcagccccccgagggccattcagcctccatcttccaagaccaattttacctcgtgtctccaacgataaaaggaaaatttagcgtacyttgaagacttaacatgatacagcgaggtcaggcacttccaaaagctaacccatcagtccacccttattcatccccaagcggatgcatagtaatactgtaaaaaacctttactagacactctaccaaataattagagcagcacttatgctctagttcaattagctatcccttttaccctggcatttcatcaatcagaaaaagagaaattacgacataagcaaataaaagaagcctcaaaagaagcagccccttacagctattttgattcccatgtctattcagatgcaattagaggtcctcacagagtaccaaataaatttaaaaccagagatcaaatagctgcaaggtttaagtcaatgttgttttagtgagtagcaattaataaaaatgtagattaaataaactgcatttattactaccagcagcaatttattaactataccaaagatgctgttaaagaaatagctgaacaattaaaacccacaagtcaaatggcctgagaaaataagataactttaaatataatattaacaaagaaaggtagtgtttatattataatcaaaactcagtgttgcacctttattccaaacaacactgctcccaatgggagcataacaaggaccctccaaggacttactgccttattaaataagttagcaaaaaattccagcattaacaactctatttcaaattagctcgagaaatagttcagccaacagaaagagaccatggcctcagtccttacttctctagcaactgtaataagtatacttctccttattagatgtcatgttatgttataccatacatttaaaagctaatcaaaacaactaagccaagacatatttaaaaaaaaaagtttgaagaagaaaactataaaaacaagacaaggaaattgtagaaagtaaaaagttcctcttcaaagtttcccttcttgttcaagaataaatcataagtgttagaaatagtagtttcttttaaagactaactgtatgctagacatgcgcacaggcctgtcccggctcgcagcctatgccccttccttatttaagaatgttattacctttctaagtcctttcgtaagtaacttcctcttttcctttgtctttctattgcctttgcctatttagaaaagttttaaactgttagctaatcaggttttagtttagattgtgaggtctggctttagccaatggagacaggacacagtagcagggacaaactgcgtaaaggataaaaattacttccctccattgttcaggtgtgctcttgccattattccatctgtggtgaatacttgactttctgcaaaaagtaaagattgccatgctaagagaattaaatttatgttcgagtgctatttcttcgtagcaccaaggaacaagcattctatttctaagtaaacattttttacatataaccaacaaacaaacaaaaacctgtctctactaaaaatacaaaaaaattagcaggacgtggtggtgcacacctgtaatcccagctactcaggaggctgaggcaggagaatcatttgaacccgggaggccggaggttgcagtaagccaagattgtgccactgcactccagcctgggtgacagagtgagacttcgtctaaaaaaaaaaaaaaacagataaaaatgtgttatttgtaaattagctgggtgcagtggtgtgggcctgtaatcccagctactcatggggctgaggtgggagaatctcttgagccaaggaggcggaggttgcagtgagcccacatcacgccacttcactccagcctgggtgatgggagtaaaacccggtcttaaaaataagtaggccaggctctgtggctcatgcctgcaatcccagcactttgggaggccgaagtgggtggatcatttgaggtcaggagtttgagaccagcctggacaacacggtgaaaccctgtctctactaaaaaaaatacaaaaattagctgggcatggtggcgagcacctgtaatcccagctacttgggaggcttaggcaagagaattgcttgagcctgagaggcagaggtcgtggtgagctgtgatagcaccaywgcactccagtctgggtgagagagtgagagaccctgtaggaaagaaaagaaggagggaaggagggaaggagggaaggaaggaaggagggagggagggaaagaagaaaagaaagaaagagagagcgggagggaggcagggaggaagggagggaggaaggaaggaagggaagggaaaggaaagaaaggaagggaaaggaagaaaggaaaaggaaagagaaagaaaaagaaagaagaaagagagaaagaaaggaaggaagaaagagaagaaaggaagaaaggaagaaaggaaagaaagagggagaaaggaaggaaaggaaaggaaagaaaggaagacaggaaaggaagaaaggaaaaggaaagaaagaaagcaaaagaaagaaagaagaaaggaagaaaggaaagaaagagggaggaaggaaggaaaggaaagaaaggaagaaaggaaaggaagaaagagaaagaaagaagaaaagaaagggaagaaaggaaggaaagaaagaggccctgtgcacagcctcacacctgtaatcctagcactttgggaggtcgaggtgggtggatcacttgaggtcaggaatttgagaacagcctggccaacatggtgamaccccatctctactaaatatatatatatataaaaaatttagctgggcatggtgatagatgcctgtaatttcagctacttgggaggctgaggcaggagaatcgcttgaacccaggagggagaggttgctgtgagccaagataacaccaccacactgcagcctgggctacagagtgaaactctgtctcaaaaataaataaataaaaataaattaattaataattgtatttattgctgctatttttgaagttaattaaaggtattttaagctgggtgtggtggttcacacctgtaatcccagcactttgggaggccaaggtgggtagatttcttgaggccaggagttcaagaccagcctgggcaacatcgtgagccctcatctctactaaagataaaataattakccgggtgtggtgtcatgagcttgtagtcctaactgctcaagaggctgaggtgggaggatcccttgtgcctaggaggtggaagttgcagtgagtcgtaatctcaccactgcactccagcctgggtgacagagccagaccctgtctcaaaagaaataaataggccgagtggggtggctcacgcctataatcccagcactttaggaggccaaggcaagtggatcacatgaggtcaggagttcgagaccggcgtgggcagcatgctgaaaccccgtctctactaaaaaaaaaatgcaaaaattagatgggcgtggtggcacacgtctgtaatcccagcgacttgggaggctgaggcaggagaatcgcttgaaccccggaggcggaggttgcagtgagccragattgtgccattgtgctccagcctgggcaaccagagcaaagctctgtctcaaaaacaaacaaacatttgcttttttgtttttaatattactattttactaatggtacaatactcccccatttaccacaagtgatagattttctgtcaggttttcttccattccatgtaaagccatttgtctcctccatcaaattattttactgctaattctgcctttagtcatctgcattgtaatcttttacctctagttttgtatgaattcaacagccttaaataactgcacggagtgatgcaacttatttatgattagaaaatgcttgttaatgaaccacatgcagtcatttttgaaattgtaaatggcattaacaatttttcttcttttcttttttttacttctttttaaaataacttgggtactctcttttccttattcttgccaagcatatatattagtgaaaacctatgcgggaagtggcaatttggtctcctcttcctcctgtagttgttagttatttgaataaggtgatttgagttatttctaattctggctgtattctcttgggttcccacagacacacaccctgagaaaggatttgaaagcaagtattaataattcactgggaggtgatctcaggaaacactggtggaggactggcgacgtgagataaggatggaagggaaaagcagttaagaaaagggtgagctatcaatccagctgccactgtgagcaactgtagctgcatcttgctgcagaaccctgggactcagtgtagagagcatgacccagasttacccacaggatgagtgagggagctggttatgaactgctgggggagtgttacagttcaggctgccagagcaaaccttgtcatggaaatcagccrggcatacactacagagtcagaagtagggatggaggcactgaagatggcaggcacaaacacagtgcaaaattttcatcatcaactctatgttttatatactttgaaagatttagataactggcatcaacttatttatcagagaagagttgaagagtgagaccatttaggaggcttgagatagtccaggtagcagcttagacttgattgtatggaaataaagaccacctacaggagaacaaataaaggctatctawtcagagcttgctatatagcaagagagagagccaccatcatgtgcatttggtaaaaagtcaaagtcaagcagaggactgcgaaaacttgatagtggaaaaagcaaaaagtttcaggtctaccctgattggasgctgtcgacctggagaagctgtaggcagctaactagaagaggcgcatcctatgggattggttaggggtgcatatttggctttctcctgtgggtcctaaattggaagctgggacagaaatgagagaagctggcagttacttgagacagggtctcactctgttaccctggctggagttgcagtggcacgatcatggctcactgtatcctcagcctcccaggctcatgcagtcctcccacctcaacctcccaagttgctgggactacaggcatttgccaccaagcctggctaattttatttttaattttttgtagagatgagatctcactgtgttgcccaggctggtctcaaactcctggggtcaagaaatcctcctgcctcagcctcctaaagtgctggggttatagtcatgagtcccgtgacaggcaaagctggcagctatcagggcatacttgaaaccttctctttttccactataaaaatttcccactcctctgcctgcctttgagtctttgccaaaacacaagtgactgtgactgacgctcttgctgtagcaggctctggataaatagcctttgattgttctctttcggttggtctttgtttatgtccatagatcaaaccatttttacttgcatcttcttgctcctgtcatatacttgttttgtgccagccgtatgaaacttctcactttccttcaaatcagcttgccagtccctagaatgtgcaagctgctcatgttgctcatgttgtatgtgtcstgtatmtagaaaacccttttactgcttctccagctgacggaaaaaatcctactcgctttactccaaaggccagctcaagtatcacctcatctgtgaagcatttcctaactcttccagggagaattaattgagccctacttctgagatcctattacactttactcatgctggtagcaggacccgattgcagtcatagctttcaggcagtgtctgcatcacctgaggaaatgtcaactcctttagggtagggggccttcatattgctcctgactcttagaagatgctcagtaaatgtttgtgaaatgaagttgaataaaatccttactctcaaaactcatttttgctatattctatacaaccaaaggtaaatgggargattggtagaagttttccttggaccggcaaacctttcccttgtcccattttaaaaaaacataaaccgaggcgggcagatcacgaggtcaggagattgagaccatcctggctaacacggtgaaatcccttctctactaaaaatacaaaaaaattggccgggcatggtggcgggtgcctgcagtctcagctactcgggaggctgaggcaggagaatggcatgaacccrggggacggaccttgcagtaagcagagatgcgccactgcactccagcctcggtgacagagacagactctgtctcaaaaaaaaaaaaaaaacaaaaaccataaacagggtattgttaatagtgttatcaaaattagctgggatgggtttggtagacttgcactttgcacttctagcttctatcatggtctcatttggtggtgtgtgaggcacttgtgctgtgagctctctctctctcactctcactctattttttagagatagggtttcactatattgccaaggctagccttgaagtcctgggctgaagtgatcttcctgccttagcctcccaagtacctgggactacaggcatgcggcactgtgccaggttcaggttcatttcaaatggaaaagacaatctttcttcccttcccaatccttgccagacctcatttaactaatagcttccttttcaaggactgcaggcagaggcagagtgcttgctgttacatgaagtgtgctccagtgctkstggcttgggacaatgaattcatgcagatctcaggcgatggcaggagaagtattggatgctcctgatcagttggtacatctgtatatgaaatacaggaggaaacaggccgggcagtcctgcccgctgtacagagaaagtggtygacacagcaggggaatttaaagatcacctctaaccatctcagttcttaagtggcatctttagtkgggcctaggaattaaattgacataaggcagattaacagaagaaaagcacacaagttttattaatttttacctgtacaaagggacacttacaagagagtgaacacctgaggaaatggccaaagcggaaagcttttctactttttagataaagaatggtaaatctgtgaagaaaggactggacaaagggatccaggttggggacagtaaattctaggggagtcactaggagatttatggggggatgtaaacctagtggaagataakgatttattaagtaagtttatctgtacaggtccagctcagtggcagttcccagtccctggagataagggttattttcttgccctggtaccggaaaggcctcctcctcaaaggaatttttatgacttgctacatgtaggaaaggacaggtcagagagccctttctgcaattacagtctctcaagtactttcagcttgaaataatcagtacatcacatcagccrattttggggtggctcatccttaactcctgcaacactkttgcttagtggttttatcattatatattgyataaatatatatatatwgtatacatctataaccatttatttattatactyacattaatttttttcmtatagactcttccagcaagaataaggtttttttttgtttttgttttgagagggagtcttgctctgtcacccaggctggagtgcagcagcatgatctcagctcactgcaacctccgcctagcgggttcaagcgactctcctacctcagcctcccaagtagctgggactacaagcacccaccaccatgcccggctaattttttgtagttttagtagagacggggtttcatcatgttggccaggctggtctcgaactcctgacctccggtgatccgcctgcctcrgcctcccaaagtgctgggattacaggcatgagccaccccgcccggctgcaataatattttttttaaggttttttttttttgcctttttgtagggtttttatttatttattttggtgggttttttttcctttctttttcttttcttttcttttcttttttttttttttttttttaagacagggacttgctctgttgcccaggctggagtgcagtggtgcaatcacagctcactgcagccttgacctcctgggctcaagtgattctcctacttcagcttcctgcgtagctgggaccccaggtgctcacaaccatgcccagctgacttttattttttgtagagatgaggtcttactttgttgcccaggctggtctcaaactcctgagctcaagcgatcctccagcctcagcctcccaaagtgctgggattacaggtgtgagccactgtgcccagacacaaaagttcttaagtttcagaccacttgtggttttgttttctttttggatgttttagttagctatggataaaatctccacaaggtgtccctaagctacagatatgaaaatgtcctgctcagaacacccytgggagtccccatccccaaactccacttaggcaactgattagtgaaatccaattagatccagcatctctcccaagatactttgactccaggtaaattcaggatgaatggagaggaatggcagcttcactcaccaccacaaggtgctgcctcctgctgtgttccagacagtcccaaagccccrgaagcacagcgcagggactccagagtgagactgaatgaaaacatatccacacgtaagtgccactcacacactctgtgtccggggcgtggaataggccaggagaaccttggtctgaaaatacgaagagctcrtttcttcctcttaatctatcactagtaccacaatactgagttgagatcattattgctatattacctcaagccaatcattaatgtcaatgrtattaactttttctcatttgtaaaaatgatmaaacttsgtttaagatgttccgtatagtcccttgaaattacttttgtttgtttgttcatatctatctataaaaacaagctgatgtagcattttttgttttgttttgttttgtttttgagacaaggtctcgctctgtcacctaggctggagtgcagtgacacgatctcagctcactacagcttcgacttcctgggctcaagcaatcctcccatctcagcttcctgaatctctggggctacaggcktatgccatcatgcccagctaattttcgttgttttggytttttgttttttgttttttgagacggagtctcactctgtcgcccaggctggtgtgcagtggcgtgatctcagctcattgcaacctccacctcccgggttcacgccattctcctggctcagcctcccaagtagctgggactrcagatgcccgccacyacgtccggctaatttttttgtatttttagtagagacggggtttcaccttgttagccaggatggtctcgatctcctgacctcatgatccgcccacctcggcctcccaaagtgctgggattacaggcgtgagccactgcacccggcctaatttttcatakttttttgtagagatagggtttcgccrtgttgcccaggctggtctcaaacccctgagctcaagtgattggcttgtcctcccaaagtgctgattataggcgtgagccactgcacccggccatgttttttctttatgcatacttaccctctttatttcttactggcttacctaaaatatgtgaagaggctgcttgccaggaggtgagagaaactggaggagagtrgtaatgcaatgagttttggatttcttttttttttttttttttgaggcmgagtctcaatctgtcacccaggctggaatgcagtgagtggtgcaatcttgggtcactgcaacttctgcctcccaggttcaagcgaatcttctgtstcagcctcccaagtagctgggattacagatgtgcaccaccacacctggmtaatttttgtatttttagtagacacggggtttcgccatattaactaggctggtctcgaactcctgacttcaagtgatctgctcgccttggcatctcaaagtgctgggattacaggtgttagccactgcacctggccgagttttgtgtttcaaatgccagacttgggacagctgaagactcctcaggtgatatggactaccaataatactgattggtaggtaaattgcggggatggaactaagatctcaaagcctgacctgtagctatctaagacatttagtatcaactgacttctttcttccttcccttcaggtaactattagggatttcctaggccagttctcaaagaaacacagcttatcttatgacccaggacacaggcacacagacacacatacgtgactgaattaatacttagccttacaccattgcactgttttattttctttccttttcctttttttttttttttgagacggagtcttgctctstgcccagcccaggctggagtgcagtggcgcaatcttggctcactgcaaactctgcctcccgggttcacgccattctcctgcctcagcctcccgagtagctgggactacaggcacccaccaccacgcctggctaattttttgtatttttttagtagatacagggtttcactgtgttagccaggatggtctcgatctcctgacctcgtgatgcacccatctcgccctcccaaagtgctgggattacaggtgtgagccaccgcacccggcctcttttttttttttttttttttttgagatggagtttcgctcttgttacccaggctggwgtgcaatggtgccatctcggctcactgcaacctccgcctcccgggttcaagcaattctcctgcttcagccttctgagtagctgggattataggcatgtgccaccacgcccagctaattttgtatttttagtagagacagggtttctccatgctggtctcgaactccygacctcaggtgatctgsccacctaagcctcccaaagtgctgggattacaggcgtgagtcaccgmgcctggctgttttcttttcttttctttgtttagagatagggtctcactctgtcacccaggctggagtgtagtggtaaaatcatagctcactgcaacctccaactcctgagctcaagaaaccctctctcctcagccttccaagtagctaggaccacaggtgcacaccacyacaccaagctattttcacaaatttttatacagacagcatctcagtatgttgcccaggccggtttcaaccccctgggctcaaacaatcctcccaccttggcccccaaagtgttggggtttcaggcatgagccrctgcgcccagccttgttattttctattctattgttttgtttgcttatcattcttggcttccaacagcaatttttaaaaactgttttggggtagagggagtatggctaacagctgttttttccttaaatctgcgctgtggatcttagaaccagatgcctgttattcactcccaagcctcctaggcaayccgccagtgagatcgtcccgccagtgagatcgtcccgctgttagtctttgagttgatggccagtcagccctgggtcttagtgggtgggaatagaagtgggggatgcagagagaaagctcattaaacatggccttgccctaggattcagaatgcagtgcgcctgcactgaatcaacctgtcagagaggctgttctttgaaaagaagtttgggtctgtcatttaaaaaaattaaacaatttagaaatgtagtcctctcctgcttaacatcagtaatctattactgaaaattggttgttctgcatraaaatgctaaccttcagcytatttattttattttaaacagaaaaattatactatgtcaaccccaaaccctcaatcaatttcttaaaaggttaactaaagcatggkaaggtrcctaaatataattcttataaaacraaacatctggtcagttgtgaaatgtktaaaacattgcttcttgatcaccaaataattaatatggtgaataacasatakgggcttttgtgcagtagaagattcaagaccaagacaagctcatgtttccctttaggcrggcttcctcctgagggaggcccctgacctccctcttcttagagcatttgctttaraaaacttgtaaattttctctctgatacttcgagatgccaattttttttttttttttggkcattttacytttagtcgatgcataatctttaaaaaagctttgtcagttttacaacccaggaaagtctttctccaagacctgggaactatttctttgaaatgcaatcagcaggacatagcatccttatctctgtttctgtgggagggcagcaggagcctgactccaaattgccttgctccaagtttcaagatatcgtgctctaagttacaaaactaactcttgtcacaaagctaggatacgtttatttctcctttttgttgatttttgaacaattagaatttatttctcacagttctgaaggctgygtgtctgaragcagggtcccagcacagccaagttctggtgaggaccctcttccagtggcagatgcccacttcyggtgctatctcccawggaggacagcagaggctataattcctttggagaaagcctactagcaaatacacamtggaattttatttagcctttcaaaaaaaggaatttctgccatttgcgacaacatagatgaacctggagaactatgctaaatgaaaaaaagccaggcagggaaggacacatactgcaggatctcacatgtatgtggaatctaaaacaatcaagctcatakaagtagagaataaaatggtggttaccaggggctgggagcgaggaaatggggaaatgttggtcaatgggtacaacatttcagttagacaggaggaatatttttttgagatctattgcacagtatgagaactatagttaataataatgtactgtrtattccaaaaatgytaagtgaatacatttcaaatgctcttcctaccaaaaaaatgatgagtattggctgggcatggtggctcacacctgttatcccagagttttgggatgccaaggcaggcagatcacttgaggccaggagttcaaggccagcctaggcaacatagtgaaaccctgtctctatagaaaattaaaaaaattasacasacrtgatggtgtgtgcctgtagtcttagctactcaggaggctgaggtgggaggatggcttgagcccaggagttcaaagttacagtaagctataatggtgccactgcactccaatctgggcaacagagtgaaaacttgtctctctaaaaaaataaaawaaaaaaaagatgagtattgaggtaatgggtatgttaattagcttgatttaataatttcacattgtttacatatattacaacatcactcygtaccccataaagacatcaaattataaaaagccaayggcaaacacaaatggcctgtgacttcccttatgtccttcagtactaattcacccaatcctttaaaacctatcccttctgggccgggtgcggtggctcatgcctgcaatcccagcactttgggaggcagaggcaggcrgatcacgaggtcaggagatcgacgtcaacctggctaacacagtgaaaccccgtctctactaaaaatacaaaaaattagctgggcgtggtggtgggcacctgtagtcccagctactctggaggcagaggcaggagaatcacttgaacccgggaggcagaggttgcactgagccgagatcccgccactgcactccacctgggcgacagagagagactccgcctcaaaaacaaacaaacaaacaaacaaacaaacaaaacctatcccttctgatgagcagtttagttcatacttagttctggccctctcccctcctgcagtttaactttgcctaaagtttcaacgttgttcagtgcaatttttcctttgacaccaccagtggtcctgtgttgcaccccttttgttttgtttcattttgtttttttgtcttttggtttatttggtagagacagggtcttgctttgttgtccaggctggccttgaactcctggcttcaagggctcctcctgcctcggcctcccatggtgctaggattataggtatgagccacagcacctggcctattgcaccccttttgttgttgtttgttgttttttggttttgagacagtgtcttgttctgttgcccaggctggagcacagtggcatgatcgtggctcactgcagccactacctcctggctcaatcgatcctccagctttagcctcctgagtagctgggactacagaagtgtaccaccatgcctggctagatttttgaattctttgtagagacagagtttcaccttgtttcctaggttggtcttgaactcttgagctgaagccatccaactgcctcggcctcccaaagcgctgggattacaggygtgagccaccgcaccaagcctgtttcgtgttttgttttttaagacagggtcttactatgtcacccaggcttgagggcagtggcgtgatcatggcttactgcagctttgacctcccaggctccagtgatcctcccacctcagccttctgagtagctggackacacacgtgctccaccacacccrgctaatttttkttctyttttttttgagacasagtctcgccctgtcacccasgctggagtgcagtggtgcaatctcagctcactgcaacctctgcctcctgggctcaagcgattctcttrcctcagcctccagagtagctgggactacaagctcaggccaccacacccaactaattatttttatttttatttttrttttttgagacagagtctcactctgtcacccaggctggagtgcagtggcaacctcctcctcctgggttcaagcaattctcctgcctcagcctcctgagtaacagggaatacaggtgcccaccaccacgcctggctaattttgtatttttagtacagatggggttttaccatgttggtcaggctggtcttgaacttctgacctcaggtgatccacctacctcaacctcccaaaattctgggattataggcgtgagccaccactcctggccaattttttgtatttttagtaaagatggggtttcaccatgttggccaggctggtcgtgaactcctgatctcaggtaatccacccaccttggcctcccaaagtgctgggattacaggcatgagccactgcacccagccttaatttttgtattttttgtatagacagggtctcactatgttgctcaggcttatttcaaacacctgggttcaagtgatcctctggcctcagcctcccaaaatgctgggattataggcgtgagccactgtgcccagccccttttgttgatcgckccacaattttccaaaacgttcatagggactctatattagytttctagagctgccataacaaagcaccacaaactgggtgggttaaaaaaacagaaaatgtattatcttacagttctggaagtcagaggtccaaaatcaaggtcttggcagggccatgctccttctgaaggctccagggaagaatctgttccatgccttacttttagcttctggtgttgccagtaaatgcttgttgatacagcactttaatcactgtctccattgcctcatrgcattcttcctgggtctgtctccgtgtctcttctctgcttctcataaggacagcagtcatattggattgagtccatactacttaatatagtttgaatatttgtcccctccaaatctcaaattgaaatgtgacccccagtgttggaagtggggcctagtaggagatgtttgggtcatggggacagatccctcatgaatggcttgatgccctccttacagtaatgaatgagttcttgctctattagttaatgtgcaatctgattgttaaaatctctcgccatgtgacacactggctctccttgccttccaccatgattggaagcttcctgaggcttccccagaaacagacactggcaccttgttctgttagaaataaaagctcagagtcgtaaagaaaatgagcactcaaacacaagatttctcagcaaggcaaattttcttctgcagaagggtgcagcttgcrccagtcattatcgcaagagcacaccgagcagggtaggaaaggggtttttatctctaatgcagttcctagcacttctgtgtcctttccccattggctggggttggacctcacaatctaagctaactcgattggctaaggtttaaaattgaatagggtctattaggtgragagtccgttactaggtgggaaaagwgtctgttactaggcgggaaggcatatctggacttgtctgggcatggcaaaggcaggaaggttgtttacagaacaggtarctaggagacaaggaagtacaaggaagytggttttaagaaacaaagaacagggaackaaagctttttgaagaggaatttatcatctctgacacttcttgtacagtctgcagaactgtgaggcaattaaacttcttttctttgtaaattacccagccttagctattcctttatacaatgcaaaatggaccaaatatagtactcaagtataacctcattctaacttaaatcttaattacatctgcaaagactatttccaagtaaggtcacaytcacaggtaccaggggttaggacttcaacacatcctttggggcagatacaatgttgaggattgcctcaacagactctgaagaaatwgcaataatatttggaataaaaggcctttcttgcatttcattttttraaaaatattgtatcatgtttaggatgtaaaaattttgtgacttttctatagaattgttagccagaaatgttatattgagagatacatatgttctatgaagtttgagttttaaaaatgaagagaaggctgggcatgcctgtaatcctagcattttaggaagccaaggcagacagtttgcttgagcccaggagttcaagaccagcctgggcaacatagcaaaatcctatctctacaaaaaataaacatttagctggggccgggcacrgtggctcatgcctgtaatcccagcactttgggaggccaatgcaggcagatcacctgaggtcaggagttygagaccagcctggccaacatggcaaaaccctgtctctactaaaaatataaaaattaactgtgtatggtggcgtgcacctgtaatcccagctacttgggargctgaggtaggagaatcayttgagcccgggaggcagaggctgcaatgagccgagattgggtcactgcattccagcctgggagacagagtgagactcagtctcaataataataataataataataataataataataataataataaaactagctgggtgtggtggcctttgcctgtagtctcagctactcaggagactgaggtgggaggatcatttgagcttgggaggatgaggctgcagtgagccatgattgagccactgcactctgcactccagcctgggcaatagagcaagactgtcttaaaaaaaaaaaaaaagaggtatttctcttttaggggagaaggtttacctgggaggcattatgcagggtgagcagtaatctatctggaggacacacttgggtttggtgaaggtgacacttcttcaaagagaaatcgagggttgtgtcaaagacaaaacccagagaagtaggcagattgattaaagaacacttgagaggcaaagatcagaggatctcagcagggtgcttttgccctagacttatatagagaggagtaaacaagctgaagtggggtgatmtgcagttggggttgttttgtatgcagaactgtctgtcacttagctgaaccagaaatattattctcagggaaacaaattgttctaatcttagctagtcaactacagcaaagaatgggaaattggaggatttgtgtttggccttgttgcagatgaacaagggagccaaccctgagaaccgtggggtcacaagagagtggacggtgagttgtacctatgtcctatgcagaaggatggttctctgagcaagtcttctccaagaacacaaaagaatgggggattttgaaaaacaaaaggtggtggaggatgggggttgcayggggttcaggttgggggtgggggtactgggggtgcagggtgctttatcatccctgctttcttttctttttaaataaatacattttctttctgtcttctttattttattttattttattttattttatttttttgagacagggtctcactctgtcgcccaggctggagtgcagtggcacaatctcagctcactgcaagctccacctcctgggttcacaccattctcttgcctcagcctccccagcagctgggaccacaggtgccagccaccatgcctggctaatttcttttgtatttttagtagagacggggtttcactgtgttagccaggatggtctcaatctcctgacctcgtgatctgcccacctcagcctcccaaagtgctgagattacaggcgtgagccaccatgcctggcctctttctgtctttattttattttacttaaatttttttgattttgtttttgttttgttttggagttttttgctcttgttgccaggctggagtgcaatgacacgatctcggctcactgcaatctttgccccctgggttcaggcaattctcctgcctcagcctcctgagtagctgggattacaggtgtgcgccaccacgcccaactaattttgtatttttttaagtacagacggggtttctccatgttggtgaggctggtctcaaactcccgacctcaggtgatctgcctgccttggcctcccaaagtgctgggattacaggcatgagccactgcacccggccaaaaaaaaaaaatttttttttttttttgagacaaaatctcactctgttgctgaagctggagtgcagtggtgtgatctcggcttattgcaacctccacctccctggttcaagtgattctcctgcctcagcctcctgagtagctgggactacaggcacgtgccatcatgcccggctaatttttttatttttagtagagacagggtttcactatgtgggtcaggctggccttgaactcctggcctcaagcgatccacctgccttggccttccaaagtgctggggttacaggcatgagccacagcacccggccaaacaaattttttttgagacagagtcttactctgttgctcagactggagtgcagtggtgccatctcagctcactgcaacctctgcctcctgggttcaagcaattctcctgcctcagccttccaagtagctggaattacaggcgcccaccactaagccatgataatttattttattttattttattgttttagtagagacagggtttcaccatgttggccaggctggtctcaaactcctgacctcgtgatccacctgccttggcctcccaaagtgcagggattacaggcatgagccaccatgcctgcctgattatcactgctttccagaggtgcagggtctcagataaaggtcawcagtgytcagtggtcaggaggaagaaagacctatgtgtcactgagcagagactgtaacttcctgccttcagttattcccagttactcttagaagtgktttatttatctttgcaaaatggatctcacagtcatggggtgccgctgccacagtggcggggcccacttagtgactgccaaacttcagacttgaaagggtatccttttgtcagactccagtgggctgtgcaagaaatccggggaaagtgcaagtgaggcctctgagatgcaggaagaccagaattcctagtccattttatttttatttaaaaaagcaagaatttaaactttactgacattgattatasagtatgcactggatttgtcactctgaatctatgtcaccgttatgtgtcacctcctcggggaagaacagaagcgtcacattgtggtgactttcctccctgaaccccttcagagtgcagcatattacaggttaggagtgcctggttaaaggcagatggaatgatctagtttcarctaaacctatctttacacaacagataagtggctttaaaagactcctacagagaaactgctggttttcaagataactctaataatgcatgtggcggcaaacaaggagctgtttgacaacactgacatctattcctacaggcrtagaagccctttgtctrctatttgacaagaaaatataataaaaatctaacatagtttattagaagttggtcaaaacattcaaaattaccaacactgtttgaaatacggatttatattattgttactatgagcctcaccctaattgttgtgtatgaagaggtktcatgaaatgtctgtkctggttattacagccatgtrtccaccaagatttgaaataarctgaacttagaagcagttcttggccaggcgcagtgggtcatgcctgtaatcccagcagtttgggaggccgaggcaggtggatcacctgaggtcaggagttcragaccagcctggccaacatggtgaaaccccatctctactaaaaatacaaaaattagctgagcatggtggcacgcgtctgtaataccagcaatttgggaggcagaggcaggagaatagcttcaacctgggaggcaggggttgcagtgagccgagatcatgccactgaacttggggttgcagtgagccgagatcatgccactgaactccagcctgggcagcagagtaagactctgtctcaacaacaacarcaacaacaacaacaacaacaacaacaacaacagttatttacatcaagggtccccaaaccctgttaggaatggggccacacagcaggaggtgagtggtgggcgagggagyattactgcctgagctccgcctcctgtcagatcagcagtggcattagattctcataggggcgtgcaccctattgtgaactgtgcatgtgagggatcttggttgcacactccttatgagaatctaatgcctgatgatctgaggyggaacagtttcatcctgaaaccatccccaccccaccaccagtccatggaaaagctgtcttccacgaaattggtccctggtgccaaataggttggggaccactgcttcacatcactatttcatagtgttgaaccagrctttcaaaattagtgaaatgcagaacgtacaaccactggtccccttcccatgatagtgggaaagacctgggtctagagtctatatttttgtacttatgagacatgttaaagtatagttttcaagaaggtaacaatgtggctgtctggcaaatatgcartgaaatgtgtcaaagattttacttagctcaccgattaatgagggaaccagtaaagatgcagtgaccagttcaaagagcatttgagaaacaagaagatttctaggacaagmcatgagtgtgatggttaattttaggtgtcagtttgactggattaaggaatayctagaaacttagtaaagcattgtttctgggtgtgtctgtgaggatgtttccagaggagactaccatatgagtctgagtggactaagtggggaagattcccctcaatgtgtgtgggcayggtccaacttgctgggggcccagagagaacaagaacagaaagggagaatgtgtccatctgtctgccagagctgggatgcacttttcttcttctgtcctcggacaacarttccaggctcccgggcctttggactctaggacttacatcagyggcccctggagttctcaggcctttggcctcagattgaagttataccatcagtttccctggttccgaggctttcacacttgggctgaaccacactactgacatcccaaggtctccagctcgcagatggcctgtgatggaacttctcagcctccataattgtgagagccaatccctctaakaaatcctttttcctatatctatatttatatctatatcatctatctgatctatatctatcatgtcccattgattctgtstctctggagaaccctaagatagtgaattaaatgttaatgtccaacaagccacaaatcrggagttacagtcatgcactgaataacaacattttgatcaatggcagactgtatatatgacagcagttctgtargcttataatggagctaaaacattcctattgcctagtgacactgtggctattctgacgtcatagcatactggattactggtgtgtttgtggtgatgctggtgtaaacaaacctgctgtgctgccagtcatataaaagtatagcakgcacamttatgtacagtccataatactttataatgataataaaagactatgttactggtttatgtacttactctattctttgttgttattttagagtatactcctacttatttaaaaaaaaaaagttaactgcaaaatagcctccggcaggtcctttaggaggtgttccagaaggcattgttatcayagtagatgacagctccatgcatgttattgtccctgaaccttctagtgggacaagacgtagaggtggaagacagtgatattgatgatcctgastataagtaggcctagactaatgtgtgtgtttgcatyttagtttygaacaaaaaaagtttaaaaaataaaaaaagcttatagattaaggatataaagaaaggaaatatttttgtawcmctgtacaatgtgtttgtgggttttttttttttttttttttgagacagagtcttgctctatcgcccaagctggagtacagaggcatgatctcggctcactgcaacctccacctcctgggttcaagcaattctcctgcctcagcctcctgagtagctgggattacatgtgtgtgccaccacaccctgctaatttttgtatttttagtagagacgggtttcactatgctggccaggctgatctcgaactcctgactttgtgatctgcccacctcggccttccagagtgctgggattacaggtgtgagccactgcacccggccaatgtgtttgtgttttaagctaagtgttattacaaaagagtcaaaagtttttaaaaattttaaagtttaaaaagtaaaaaagctacagtaagctaagatttattatttaagaaaatgttttccagtctgggcaacatagtgagaccccatctctacaaaaattacaaaaagttagctgtgtgtgttggctgatgtcggtggtccccgctacttgggaggctgaggcaagaggattgcttgagcccaggaagtcgaggctgcagtaagccatgatcacactactgcactccagcctgggagacagagtgagacctcacaaaaaattaaaaaatgtttaaaaataaatgccccacctgagcaacatggtgaaacctcgtctctacaaaaaatttaaaaactacccgggcatggtggcgggtgcctgtggtcccagctatttgggaggctgaggtgggaggatctcttgagcctagggaggtcaaggctgcagtgagctgtgatcgcaccactgcactccagccaggtgagagagctaggccctgtctcaaaaataaaataaaataatccatccataaataaataataaatgtagcatagcctaagtgtccagtggttataatctacagtagtgcaccgtaatgttgyaggctttcacattcaatcaccactcagtgactcacccaggcaacctccagtgctgcaagctccattcatagtaagtgcctgataaactacagggcacttttgggcagttgactttaaagtaaataggcttctaaattaacagcctgagggagggcttgtrattcatgcaaacatcttgtccctgagtaacgaatcttattgtgagttcctyaaattgtcaagtactgattaatgcacaacctcctgacactgaagaggactctgactcacttttgaawcaaatgtcgatattttagcctttatattgcagtctgtagccaatgattgtaacctctgtgttgtacctccagtgaaaaggatggttgtgctgtcaggagtcctcccttcttctaaactttcccataaaagccttccaacttgtagcagactccagaacactcccaactttgttagcgtgtcttcccaggtcaaccatacatatagcctaggtgtatggtaggctagaccacctagatttgtgtaagtgtggcaggccaattctccctgacaatcacacagacaggcctgcatagcastccagttacacagatttccacagagctgccttaacattgagcaaatagttaaacctagcaaaatcggcacccagacagcaaagctagaaatgaarcrtatggtcagtaggagccttgcgtgggcttctccctaacctggagcaaaccaaaataatacagtctttcattcctagtgcaggacccatctcgggtcaacgaaatctgagacagtcaaggtaacagagctgtttgagtarattcattggagagtctaaggcagcactccagaccaagctgtaaaggagataagatagaaataatcactctggtaccacagtacacaggccttgaaggtactgaggcccttttaatcagacttagtaagcattagtttgcctctgaccttctagttgaaacaaaattagttaccaatagacttaggtgaatgctatactgcatgtgggcatataaccccaacctatataatcatgaagaaaattgtaacactttgagttggtcttgtggaattatctccagcctgctccctgtaactggttacagcaataaattctcttctttcctagtttttctgcttcttgttattgggccytgagaaaacgtagcyggacccggcttggttccgtgaacataagtacactctrtgatgttcacaccatttggcttccaataaaccgttttttgttgttgttgttgttktttggagacagattcttgctctgttcccagtctggagtgcagtggcacgatttcagctcacagcmacctctgcctcccaggctcaagtgatttctcgagcctcagcctcctgagtagctgggattatagacacgcaccaccacgcccagccaattttttttttttttttgagatggtgtctcacatctgtcgcacatgctggagtgcagtggcaccatctcggctccttgcaacctccacctcccgggttcaagagattctccttccttagcctcccgagtagttgtgattatacgctgtgccaccatgcccagctaatttttgtatttttagtagagacaggtttcgccatcttgcccaggctggtcycaaactcctgaccttgtgatctgcctgccccggcctcccaaagtgctggggttacaggtgtgagccaccgcgcctggccaatttttgtatttttaaaagagacaggttttgccatttggctaggctggtcttgaactcctgacctcaagtgatctgcccacctctgcctctcaaaatgctgagattacaggtgtgagccaccrtacttggccccaataaacctttatcaaattatttgtgccccaacagccttaattttggtaaacatgtcctatacaggtgtaccattttttatcttttataccatatttttaccgtacctacttatgtttagatacacaattacttaccattgtgctacaattgcctacagtatttagyatactaacacactgtacaggtttgtaacctaggagcaatttgctattccatatatagtaggctgtatcatctargtttgtgtaagcacactctataaggtttgcacgaggacaaaatcacctcacgcatttctcccygctgttaagcaayrtgtgacctgtatctgtcccaccaacagaagttatttgcatttcttcctgacaaaaatcttcaagttaacaagtaatttcacgaattctgggacccttaatcaatagtaaataatgggataaactttacgttactatgatcctctggctgaatccagcccacatattttgtaaataaagttttgttggagcccagcctatttcttcctttgcttattgtccatgactgcttttgtgccacaatggcagtcctgagtacacacagcagagattctaaagtccacagatttagacttgagttctcaacacagaaatcctaaagctcacagtagaracagggtttctacctgactcagagcctgagaaatttactatgacttagagcctgagaaatttactatgtgaacctttacatgctggggaaagcctgagggtcatgaccaactcagcaytccactggaggctatatgataaaaragcaaactgtttatcacgaatgcaggatgtggggaaactcacatctgcacctgccaccagaaggtatgctgagggcaatcactccctggcgccgtgctccttgaggttatctrctggaacatctggagcctactgttcaaagaaagcagttatgcaggcctgcactaagtgaaacagctgactgacaaccaccccctcctcattatttcctttactcaataaatacaaagggctatagaagctcagrgcccttgttcactagaagcaaggagacccctgaccccttcttccaaatatacttgtttgtctttgtctttattccckcattcgtcctcctttgttcagtccaccagggtccgtggcacagtggagcctgagggttgtgaccaacttttacaaataaagttcgttggccctcactctagacaaccctatgatgatctttgccactgcatgaaagtgaaattgtcagaagcatgtgaaccagagcaactccatcttgaataggggctgggtaaaatgaggctgagacctactgagctgcattcccagatggttaaggcattctaagtcacaggatgaggtaggaggttggcacaaaatacaggtcttaaagaccttgctgataaaacagactgcagtaaagatgccagctaaaacccaacaaaaccaagatggcaacaagagtgtcctctgattgtcctctctgctacactccgtccagtgccatgacagtttacaaatgccatggcaacgtcaggaagttaccctatgtggtmtaaaaaggggaaacatgaataatccaccccttgtttagcatatcatcaataaataactataaaaatgggcaaccagcagccctcggggctgttccgttcatgaagtagccattcttttattcctttactttcctaataaacttgctttcaccgtactctactgacttgccctgaattctttcttatgcaagatccaagaaccctctcttgggatctggatcaggactcctttcctgtaacaaaaggatgtgctatttagctttttgccttatttccaagttttgcatactttttctgaccaacacttgagaacctttaatatatagtttttctgtttccattgkcttcagttccaattgtcttttggttccaattctctaagttttaattcaaccagtgtttactgaacacatactatgtaccagaagctactgcaatgaatggaacctagccctcaccttcacattttgtgaggaaatcaaatgtgtgactgtgaagggttcttcttttagataactctttttttttttttttttttgagacagagtctcactctgtcgcccaggctggagtgcagtggcacgatctcagctcactgcaagctccatctcccgggttcacaccattctcctgcctcagcctcccgagtagctgggattacaggcgcctgctaccatgcccagctaattttttgtatttttaatagagacggggtttcaccgtgttagccaggatggtcttgatctcctgacctcgtgatccgcccgccttggcctcccaaagtgctgggattacaggcgtgagccaccgtgcctggccaagaggagaactgtaagtccaatctaaggaagatatcctagatatgcgaagattgaaggcaggggagaaagagaaataagacgttaatagttgctagagggaaacatgtgaatttgttttggggactctttggttttaagaaaatcactttggccggacacggtggctcacacctgtaatcccagcactttgggaggctgaggtgggcggatcatgaggtcaggagcttgagaccagcctgaccaacatggtgaaaccctgtctctactaaaaatacaaaaaaattagccgagcatggtggtgtgtccctgtaatcccagctactcaggaggctaatgcaggagaatcacttgaacctgggaggcagaggttgtagtgggccgagatggtgccattgcactccagtctgggtgacagagggagactccttctcaaaaaaaaaaaaaaaaaraagaaagaaagaaagaaaagaaaatcacttcaataggccttttgattgtgaaaaagtgaaggcaaagtcctattttaaaaaggagacatttgaagtgaggacccagctctgatttttttttttttgcccaaattcctgtctaararatctggggagtcatgccctacaaactataaattctcatcagatgggttttatttaaccttatatatcgkgttttactttccaatctgactcaggcataacattacgtgacaaagaaraaaatcaaaatattttatcccaaaacatgtttctttgccatattttgaaatggccctgcaagccatcctttgtgggggaaattttgcatgtgtaaagaatctctgttaacatagctagatcttttccttccaggccctctcaatcctgaagaaattaactaagagtctagcaccttttaaaggtctgaataggaaatatttgccatctattgtctctaagggcagccactgtgaaacttcaaaagaacctcgatctccataatcttttttcttaacccgaatatttccttgctattaatcccaggtctttttaaatttttatttattatttatttatttttttttgagatggagtctcactctgttgctcaggctggagtgcactggcgtgatcctggctcactgcaacctctgccccctcgagtttgagtgattctcctgcctcagcatctcgagtagttggtattacaggcacctgccctgtgcctagctaatttttgtatttttagtagagacagggtttcaccatcttggccaggatggtcttgaactcctgaccttgtgatccacccgccttggcctcccaaagtgctggaattacaggcgtgagccaccgcgcccggccaatcccaggtctttagacaaactcaaccaattgtaaaccagaaaatgtttaaatttacctatagcctggaagccccctaccccaaccttgctttgaattgtcccacctttctggacgaaaccaatctgtttctcaaatgtatgtgattgatgtctcatgccctccctaaaatgtataaacccaagctgcaccccaaccaacckccttgggcacatgttctcaggacctcctgaaggctgtgtcacagaccatggtcactcatatttggctcaaaataaatctcttagaatattttacagagtttgactcttttcgttgacacaagcaataggaaggtaaactgttctgctcaggatcataaaaccttgtctttttttttttttttggagacggagtcttgctctgtcacccaggctggagtgctatggcatgatctcggctcactgcaatctccgcctcccggtttcaagtgattctcctgcttcagcctactgagtagctgggattacaggtgtgcaccaccacacccagctaatttttgtrtttttagtagagacggggtttcaccatgttggccaggctggtctcaaattcctgacctcaggcaatctgcccaccttggcctcccaaagtgttgggattacaggcgtgagccaccatgcctggccaaaaccttgtctttttattgtgccttgtttcagtaataaatatgttgtaagacacttttcactatacaactacttatacacacaatatacaaaaatcaacaaaatgcttcagtcgaagcacacaggagtggtaaaagtaaaataatttatattaaaaataatatatacagtcggcacaccatgtggattcaatcaactgtggatgaaaaatatttgaaaaaacaatagaacaataaaaatgatacaaataaacaatacagcataacaactatttacatagcattttcattgaattaggtgttatcagtaatctagagatgatttaaagcaggagtgtccaatctttcggcttccctgggccccattggaagaaaaataattgtcttgggtcacacataaaatatactaacactaacgatagctgataagctaaatatacatatatatagcaaaaaattcataatgttttaagacagtttacgaatttgtgttgggccacattcaaagctgtcttgggccgcgggttgaacaagcttgatttttttttattttttactttgtatttatttatttttttgagacggagtctcgctctgtcgcccaggctggagtgcagtggcgccatctcggctcactgcaagctcctcctcccgggttcacgccattctcctccctcagcctccccagtagctgggactacaggcgcctgccaccacgctcagctaattttttttgtatttttagtagagacggagtttcaccgtggtctcgatctcctgaccttgtgatacgaccgcctcggcctcccaaagtgctgggattacaggcgtgagccaccgtgcccggcyggagaagcttgatttaaaggacagaggaagatgtgtgtaagtcatatacaaatactgtaccattttatataaggaacttgagcatttacaagtttttggtatccttaggggccctggaacaccctgtttgatgctgagagatgactgtagttaacagtcgcattacttggatatgataacatcagaaggcataatgaatagtgagatgcttgggcctctatgttgaggacgaagctctgatttttttttttyccccaaattcttatgtaaggagtctggggagtcatgcyccacaaatcatcagttctcatcagatgggttttatttaatcctgtatattgagacttactttccaatctgactctggccatggcaaggaagaaaataaaaatattttacctcaaaacatgtttctctgtcatatcttgaaatggccctgcagagccatctcttgtgggaaaaatccacattccgtagagaatccccttttccccttttttgtccttccttcctttccagatccaggagataatcaactaagagccaagcacccttttagttccgataagaaacattttgcaacctgctctcyctgaagtctgctatctgagakcttcctctgcacaataaaacttggtacccacaatcctttatcttaacctgaacatttcctttctattgatcccaggccttcagataaactcaaccaattgtcaaccagaaaatgtttaaatttacctatgaagcccccccgcgctttttgtcctgccttttggaaccaaaccaatgttatttcttaaatgtatttgattgatgtctcatgtctccctaaaatgtataaacccaagctgtgccccaaccaccttgggcacatgttctcaggacctcctgaaggctgcgtcaccggccatagtcactcgtatttggctcagaataaatctcttaaaatgttttaccggccaggcatggtggctcacgcctgtaatcccagcactttgggaggctgaggcgggtggatcacgaggtcaggagatcgcgaccatcctggctaacatggtaaaaccctgtctctactaaaaatacaaaaaattagcsgggtgcggtggtgggcgcctgtagtcccagctactcgggaggctgagtcaggagaatggcgtgaacccgggaggcggagtttgcagtgagccgagatcgtgccactgcactccagcctgggcgacagagcaagactcctctcaaaaaaaaaaaatgttttacagagtttgactcttttagtcaacaccgttaaatactgaaaaagggatggatatagaaacagttatggtgtatcactgactaaaataccaaaattaggctttccttcagagacatgattttccaaaatggtgagtaaataaaatcctgagccaagaaaagtacagtatttcctagatttgcaaatctacagtgattgaattcctggaaaattcagtgtctagtaaaactatgcaaaaatattttgttaacatgtaaaagttaggccgggcgcggtggctcatgcctgtaatcccagcactttgggaggccgaggcgggtggatcatgaggtcaggagttcaagaccagcctggccaagatggtgaaaccccgtctctactaaaaatataaaaattagccggacatggtggcgggtgcctgtagtcccagctcctcgggaagctgaggcagagaattgcttgaacccgggaggtggaggttgcagtgagccgagatcgcgccattacactcctgcctgggcaacagagcaagactccgtctcaaaaaaaaaaaaaaaaaaaaaaaaagaagtaaaagttaggtttaagctcagataattataaacaggtttttaaccttcataaatgggtggagggacactaaaagtttatctgggctggggaacaattttgcttttggaggctgttctacacattgtttactgtcgctggcctcagccgggcccatgcaaacatgcaaatcccgccagccctctaaatcgttggtacagacttcaaaaaatttccaaattgccctctagagggcagtactagcactgtagagagtcactgaaccaaaaagctctgctgtggactaaacctgccttgcttcttggggcggggtagggcagcattattctgtggtctgggctgcctggggttggggataagtggtaggggcaaagacattattttcctctcaccagccccttcgggaaggctggaatgctggagattttacaaacacgaatcgctatggtgacacctgacaccttttttgtgtattttaaatcttctaatcaatttgggatagaaaactggagtcaaaaactcttccctacaaaaataatgcaatatttctatctatctatctatctatctatctatctatctatctatctatctatcathtatcatctatctatgtctatatmtatcagtatgtgtgtatatatatgtatatacatggctgtatattttatgtattcctacacaattatgatgtcatggtttgtactgtagaaaaagtgggggcaatctaaatgtccatgaacaggagagtagattttttatttattatttattattatttttgagacagaaaaatatgtcacctaggctggagtgcagttgcgtgatctcggctcgctgcaacctytgcctcccaagttcaagcaattctcttgcctcagcctcccaagtagctgggattacacactgggctaatttttgtattttttgtagagacaaggtttcaccatgttgcccagactggtctcaagctcctggcctcaagtgatctgcctgccttggcctcccaaaatactgagattacaggtgtgagccactgcttccggttaatcttcaactatatatatatatatatayayacacayacatatatatatataywcatayacatatatttatttattgagatggagtcttgctcttgtcgcccaggctggagtgcagtggtgccgtcttggctcactgcaacctcctcctcccaggttcaagcgattctcttgcctcagcctcstgtgtagctgggattacaggcgcctgccaccacatctggctaatttttgtatttttagtagagacagggtttcagcatgttggccaggctggtcttgaattcctgatctcaggtgatccacccgcctcagcctcccaaagtgctgggattacaagtgtgagccacggagcctggccaataatatatattttaaaaataactatattttccaaaaataaaacatatgagtagaatgcccttgttttacatttttgcaaatctcgttaatatctgacctactagaagacagattatctaatcagttstgtattcaatatgttgtgatattatgtaggttctagaaaattccactttacactcatgagagaatggaagttaaaragctaaatataataattattataaaactaatttgaccttggaggcctcttgaaagcatagggccctccccaccaaggaccacggggcaccactttgagagtctttgctctcaaatcaattaggacccagactmtatgaagttaaatgttamacagattgatagttttttgtgtgtgtgtgagacagagtctcactctgttgcccagactggagtgcagtggtgtgatctcggctcactgcaacctccacccaccgggttcaagtgattctcctgcctcagcctcccgaatagctgggattacaggtgcctgccaccatgcctggctaatttttgtacttttagtagaggtgggatttcaacatgttggtcaggctggtctcaaattcctgacgtcaggtgatccacccacctctgcctcccaaagtgctgggattacaggcagcagccacctcgcccagccgatagtttgtaatgatattttttaaagatgtaaatgatttctgtccaattggaactccaaaggtaacagttttctcctttcctttccttccttcttcttttctctttttctttctttctttcttcctttcttttttttttttttttggcagggtctcactctgtcaaacaggcaggagtgtagtggtgagatttytggtcactgcaacctccatccacctcctgggttcaagcagttctcccacctcagcctcctgagtgagtagctgggactacaggcactcaccaccatgcttggctaatttttgttattttttgtagagatgtggttttaccatgttgccaaggcaggtcttgaactcctgggctgcagcatctgccctccttggccccacaaaatgctaggattacaggcgtgagccactgcacccagttttcattttcattttaagctaaatttaaccagtcttatatctgatttagcaaacatgctggtgttctgtttttcccccagtggtgatacatatgtggttcctcaaattctccttagaaccaatttttccatccagctggtccccctcattgatgagttaaataaacctttaagctacattcacgtttgacastttatctgatatttatgtaagactcatgttttgaagtatttgaatgctgtattttgtttctcaattttttatcttgaaaaaaaattcaagcctttagaakaattgaaagaatactgcagtgaacacctttatgccatttttcctagattcaatcactgaatttttgccatgtttactttaattccacgcccccacctccaccatccrtttatctattgtaagggtagatttcaaaaatgagtttcccatttgccaagaaggaaggaaatctttccctcmtccccttcttagagcatttctgtcagaaaacctygtggctgtaaagcctttttctagccttttaaaataaaaatatktcwctttagatgctaagtgcaagggcattatcctacatagccaaataaactgatctcacacagagaatttataactrtacaaggtattctattttctaatacattgtctgcattctaatttcctcattagttccaacaatttgctttatagcttttcttttttttattttttgcttcaaaatccaataaaaaattgcacattggctgggtgcaggggcttacacctgtaatcctagcactttggtaggccgaggcaagagtatcccttgagcccaggagtttgagaccagcttgggcaacatagtgagactctgtctctaccaaaaacacacacacacacacacacacacacacacaaaacaggcgtggtggcgtgcacttatggtcccagctacacaggaggctaaggcaggaggatgtcttgagccccagggttagctgcagtgaactatgataacactattgcactccagtctgggcaacagagtgagaccctgtcttaatagagcgcattcatttcttaggaatttgaaccttccactggctaggtaacagcttatatttttaaccattcttcactaagagttaatgcttcttttctgtatataagaaagaaatggtaggtagtgtgatgtactagatgcaaatctttgtacttgcaaattactcaattttactaagcttcagtaaattgattaggatgcttctggttgccggtaacagaaaatccaaattaaaaatgaccgaaacaattacatttgatatctcacataaaaggctgggcacagtggctcacacctgtaatcccagcacttgggagaccaaggtgagagaatcacttgagcccagcaattcaagactagyctgggcaacatagtgaaaccctgtctctacaaacaaaaaaaggaagaagmcaaaggagaaagagtagaaggagaaggagaagaagaaggagarggaagaaggaggaagagaaggaggaggaaggaagtggctcttgcctgtaatcccagaacttttgggatgctgaagtgggtggataccttgagcccaggagtttgagaccagcctggacaacatggcaaaaaaccatttctacaaaaaatacaaaaattagccaggcatggtgacatgtgcctgtagacccagctacttaggaggctgaggtgggaggatcacctgagcctgggtggtggaggctgcaatgagtgaagattgtaccactgcactctagcctgggccacagagcgagaccctgtctgagaaaaaaaaaaaaaaaagtcttagttgtaggcagagattgccagaaactagatttttccagcctgtgttgcctcagccatgtgacccaggtctggcaacgttcttgtctttcttttgactttggagccagtgacagaagaaatagggataataaacttcctctctggcacctgctggctagagagcgtggttctctaggcttccaaacaattctctgagaaacccagtatctgttgagttaactttttttttcatcttagatcagctggagttgactactgtggcttgcacatggaagctgggagaacagaaactctcatgtggaagagccaagatgtccttggagccattaccagcctcttgctgagcattctttcctactatattcagccgggagtttctccaatggtcctacctcctgtgtactctgtccctaggcatccctcaaatggagatcatcctgccccagaaaagtctctgagaacggagtcaacggtagacagcaggaaagagtgagtggagatgccggctccactgtgccaagtgaaaataacttggtgagcactgagggcactctaagcacgggccagtcagtatcaaacactgttctgatcctagcaacagtatgaggcagaaacctaagttacagaacttgatttacagaccaggaaatgaaggtttataaagtttgaagaagtaagactgggatttcaatacagattgtatgtttctggaacctattgactttatttgtgagtttttgtttgtttgtttgtttgttttgcccttctttctttatttaattaaaacatctgctgatggcaagaatgacccatgtgcctaacaaaaatgcaaatggttaacatgcagagtggaaattctatctttgataaatgtctgttggaacctattgactttaatttcaaactctacagtctcccggaggggatgatagaatactcatagagtctatggggatttttatcaggctgatgtgaagggagaaatcatatgtatgggcatgatggtgtgcgctactcagccttctgagtaattccagctactcaggaggctgaggagccaggatcccttaagcccaggagtttgagtccagcctgggcagcatagtgagaccctctttcaaaaaacagcaaaaaagggctgggggtggtgtctcatgcctgtaatcccaacactttgggaggcagaggtgggtggatcacttgaggtcaggagttcaagaccagcctggccaacatggtgaaaccccgtctctactaaagaggcaaaaattagctgggtatggtggcgtatgcctgtaataatcctatctatttgggaggctgaggcaggagaattgcttgaaccctggaggtggaggttgcagtgagcagagcttccgccaccacactccaccctgggtgacagagtgagactccgtctcaaaaaaacaaacaagcaaacagtggaaaagggctgtggtgagttgacttgctatgctctatactgaggggtcaaaatatgggcatatggctgcctgatgcctgagtctttcaggcacagctgggataagattttgacatatgcaaaaagcaaagtctttgaataaactaatttccatggcttgaatttgttacaatctatctcaatcttgtctactgatatttgaagaaccaaatgagtgtacattggggctcctcatgtgcacactggtttgaagagagatgcttgtacgtatcaccacagccttctcagggaggagtgctgggcaagttacaaagacacaagtgaaggaaatacggaaatggtagaaggaaaccaacataggcatatgaagcaggattaagcattagaaaatgacgagtctggctcttctgagaagcagacagcaagatgggattacacttgaagtattttactgggggaaacactagagtgaaaggaaacaaggaggaagccgggaaaggctgagagagcagtcacagtgatcagcctcatcagacccatgcaaggctgacccagagtgaaggagagggagaaagaaggttgaatggcagcatctcagtcagcctgcggcctgaggatgtagcagcaaagacttggaggagttcctgagccaaaattaacaatattcttttgatatcatccaatacccatattcaaaatttttttttttgagacggagttttgctcttgttacccaggctggagtgcaatggcgtgatctcagctcactgcaacctctgcctcctgggttcaagctattctcctggctcagtctcccgagtagctgggattacaggcacccaccaccacgcccagctaattttttgtatttttagtagagacggttttcaccgtcttgggcaggttggtcttgaactcctgacctcaggagatccgcccgcctyggcctcccaaagtgctgggattacaggcatgagccaccgcgcctggacccatattcagatttctttttttttttttttttgagacggagtctcactctgtcacccaggctggagtgcagtggcgggatctcagctcactgcaagctctgcctcctgggttcacgccattctcctgtctcagcctcccgagtagctgggactacaggcgcctgccaccacttccggctaattttttttgtatttttagtagagacagggtttcaccttgttagccaggatggcctcaatctcctgacctcgtgatccacccgcctcagcctcccaaagtgctgggattacagatgtgagccaccgcacccggcctcatattcagatttctaaaatgagtccttacttaaatttttctaaatgtctaaaattatatttatgctattggattgtttgaatcagggtacgaagaaaaccaagaaaaaaggtccactcattgcatatgttttttgtcttttaaatattttgttatgttttgtttttggaggaagggtctcacactggcagccaggctggagtgctgtgcctcagtcacagctcactgcagccttgaactcccaggctcaagcgatccttctgcctcagcctcctgcatagctgggactacaggtgcacagcaccatgcctagctaattaaaaaattttgtaggccgggcgcagcggctcatgcctgtaattcccagcactttgggaggccaaggagggtggatcacgaggtcagaagttcaagaccagcttggtcaacatggtgaaatcccgtctgtactaaaaatacaaaaattagccaggcctggtggtgcaagcctgtaatcccagttacctgggaggctgaggcaggaaaatcacttgaacctgggaggcggaggttgcagtgagctgagatcacgccattgcactccagcctgggcagcagagtgagactacatytcaaaaaaaaaaaattgtaaagacagcccaaaaatacaaaaaaaattagccaggcatggtggtgcatgcctgtagtcccagctgcttgggaggctgaggtgggagaattgcttgaatccaggaggtggaggttgcagtgaccaaagattgtgccaccgtactcctgcctgggtgacagaggtaaattttgtctcaaataaaaaaaatctgtagacacaggatcttgctatgttgcccggtgcccaggcttgtctcaaactcctggcatcaagaatcctcctgccttggcctttcaaagtgctggctttacaggcctgagccactgtctggcctcttgagtgggaggatcacttgagcccaggagttggaaaccagcctgggcaacatagtgagatcttgtctctacaaaaaatttaaaaaatagctggttgttgtggcgcatgcctgcggtcccagctactcaratggctgaggcaggaggatcgcttgaacccaagagtttgaggctgcagtgagctatgattgtaccagtgcacttcagcctggacaacagagtgagaccttgtctgtgaaaaaaacatcatgttggagaaacaagaaattaagacccaagggaaaatgccaattcataagtatagaattagctaatttaattgttaagcaaaaaaaaaaaaaaagtatttaaattcatgtattcagatagcttataagtgattacaaagctatgatgtattttcagctctatttaatctggagttaaagctccaattgttatacatcatcctacagtgaacagtcagtattgattcaataaagtttactttgatgttctgtttttatatttctttcatcagtactccctacagttgtctctaacagaacatctgtgaaaagaaaagaaaatttcagatttattatgccaaggggaaaaattaagtcccggaaactgactcacataatatggctgtttttcttgtctggtgcacaaccattgcttcctgacctttgtgttgagatgttatacattaaccagactcctatgctttattcaaacctagattaaatcttgttggagatagagactctttatctacctctttatatgaaatgttaagcaaccacttagagcgtaatcgatcataaccaatcagrtcttgtaactgtttgttagtcttgtgtggaaaatgtaattctgttcagcattcttgttttttcctatataaatgacccctacctttctctacactggggagcactcatcgccattctttggtatccctgttttcccatacagccaccctcacactttgcacttgaataagctatttttaaaattatttttatagattcagggagtacaagtgcagttttgttacatggatatattttcacagcagcttttagtgtagccatcacccaaatactacattgtacccattaagtaatttctcatccctctacatcctcccacccttcttgttttttttgtttgtttgtttgttttgctttgttttgttttgytttgctttgttttgttttgttttgagacagagtctttctctgtcgcccatcctgggttcaagcgattctcatggctcagcctcctggggttttaccctgatggtccagctggtctcaaactcctgacctcaagtgatctgtccgccttggcctcccagagtgttgggattacaggcctgagccactgcacccagccccgccacccttytgagtccccattgtttatcacttcactctctatgtccatgtggacacagtatttagctcccacttataagtgagaatgtgccgtatttagctttctgtttctgagttattgcacttaaattaatggtctccagttctatccatgttgttgcaaaagacatgattttattcttttttatggctgaatagtgtaataaactcttttaactggatcctgagccttttggttattttaggttgacaatctatgtgacagtaaatttggtcagtccctttattcaacatcctcagtaaggttagattatgttgagtttctacagattctattagagcccacacttttttttttaatgccattgacttgattacaaagacaggttagttgtcctgcatgatgtcctaaattctgactttgactaaatatttcctcctagtgttacctaactttttcctctatcttctatttttcttgtagactacaggcttgaatagattcaggtttaaggttttgctttgtattgcttagtttatgactacttcataggtggtgctgtatgcttcctattgcctcatattcaaaagcatgcaatagctggttgtttcacttacagtggctgctaagatggatcagcgagttcaagtggtggcatcaacctttttacctaatgattttgtcatctattgataaccagtatttaagtcattttattaggagctacaaaatgttgactttctaatactacatttattatctgtaattattctatatagaactcttatctagtagggttatttgatttccaggaaatactgttcatactggaaaggtgatataaaatctcggttctttccccttaattatcagtttttggagtaatgagttggtgcacagcaacctttgctcgattcattcactatggcgtgtttgttctttcctctttaaaaaaattatgactttttattatttatatatttgtttatctacttgagacagggtctcactctgtcacccaggctggagtgcagtggtgcgaacacaactcactgtagcctcaatctcctgggcttaagcaatcttctcacctcagcccccagagtaatatttttatttattttaatcaattgaaataataattcttcttgatgttcaaatcatcttatctttgaccaaaaggaccctcttcaagctggcttatggaattttttgttatttgatgtgtcccatcattagcctttgataatgtttttactttctggggcaacaagctgttccaagcttatttttcttccttttctttttttttttccaattttattttgtactttttccgccctggacctggtttaggtgtggtgcttttaatgaaaaatggtatgaatttcagctattctaattgtggatagtgatatttcattgtggttttaatttgcgtttctctgatgactaatgattttgagcatctttccatgtgctgattgatcattcatatatcttctttggtaaaagcatctattcactgggaggcggaggttgccatgagccgagatacaccactgcactccagcctaggggacacagcaagactctgtctcaaaaaaaaaataaaaagtgtctgttcaaatctttcactcattttaagaaaatgggttgtcatttttttcctatggaacagaatttattggatagtagcattttaggaaaaatataagctctactatatatatatataaatctatatagatagatagatagatagatacaatcaactgtaaagtccatctcaacttcagaaaatgtaaagacatgtccatcttagaaatgaagaaatggcttccttgcaagtttgcaagaacattagtgacataatgtataaagtacttaacataagtgttcaaagggtaactgttgttactattatcaactgtattaattaaactgttttgagatttaacacacatgttacagactttaagaaagcagctgagtgcaggttttttgttttagttttgcgtttatgccaatgtgaaaatatgaacagctcagttctacattctgttccctgaaaataccacgagagctattagacagtcttgaaaggcagtatctaacataagctttgtgtgttcatggatatttgttcaataataacatttaaataatgagggaggccacttctaaagacttatcatttacctgatctacacaatatctagcataggaccagttctcaattgacggcaaacagtccyagcaggtcacttcattttgaacagacattgcaattgcacttgagaaatcatgccaagttttgcagggattgtccttggacttgtcaccacgaagacataactcatgctatttacatattatagcattttctttctttttttttttgagacggagtctcactctgttgcccaggctggagtgcagtggtgcgatctctgctcactgcatgttctgcctcccgggttcacgccattctcctacctcagcctcctgagtagctaggactacaggcgcccgccaccacacccagctaattttttgtatttttagtagagacggagtttcaccatgttagtcaggatggtctcaatctcctgacctcgtgatctacccgcctcagcctcccaaagtgctgggattacaggcatgagccaccgtgccgggctattatagcattttctagactagttcaatctgcaatgtccttgcactgaccagggctccatttcctttatcagagggctatgatggaaatgatgtggagttcacctggctgagacggaatgactctgtgcatgggctggaaaccctgtggcttgcttagtacaccatacaatggtatttcaccttggacaccagattgcagcaggagacaggtaactcatgtgacaattttttttttttaatttttaccattgttttcgtagatattcctaggccagttctaagagtttgtttcttgggagattagtgctggaggccagaagtctgagatcaaggttggttttttctgaggcctctctccttggcttggaaacagccgttttctcggtgtcttcacatggtcttttgctctgtacctgtccaaatttccttttcttataaggacatcacttgtataagataagggttttcccctcattttaacttaattacctctttaaaggccctatctccaaacacagttacattccgaggtactgcaggtcagggcttcagcacatgaattttgggcaaggatggagagggttggaaacaatacaattcaccccgtaacaccagatctgactcctctcactagcctcctcaaagagtgaggggttactgtgtgtccttttcagattcaaattaaacaagcttttgctctgtcagccaattctgggaaaccaagtttggtttgggcagccagtcaggttgtctttttattactaagttgtaagagtttttttttttttttttttttttttttttttttttttttttttgagatrragtcttgctctgtcrcccagrctggagtgcagtggtgcaatcttggctctctgcatcctttgcctcctgggctcaagccatcctcccacctcagcctccagagtagctgggacgacaggcacgtgccaccttggctggctaatttttttgtatttttggtagagatggggtttcatcatgttggccaggctggtcttgaactcctgaactcmrgtgatcctcctgcctcagyctcccaaagtgctgggattacaggygtaagccactgtgcccggccagttgtgagaattttgtatgtattctgactaccagtcctctgtcagatatatgtattatgatgatttctcccagcctgtggcttgccttttaattttcttaattttgtctttcaaagagcagaagttttgcattttgataaaaatgcaacttaccaattatttcttttatggtttctgctttggcaagtttgtaaatatttttttccctgtgttgcatggttttagcaattatctttaggtctatgatccacatggagttaatttttgtgtgtggtgtgaggtagggattgaggtttttttttttyccaatatagatatkcagaatttaggctgggtgtggtagatgacatctgtaatcccascactttgggaggccaagatggttaattgcttgacgtcaggagttcgagactagcctgggcaatatggkgaaaccctgtctctaccaaaaatacaaaaaaattatctgggtgtggtagcatgcatctgtagtcccagctacttgggaggctgaggtgggaggatcgcttgagcccaggaggcagaagttgcagtgagccaagatggtgccactgcactccagtctgggtgacagagccaaaccctatctcattaaaaaaaaaaaaaragagagagagaagaaaagggaaaagaagatatgcagttgttcctgcaccatttgttgaaaagactggaatgttgattttaataatgcatgtaaattctccaccaccttgggaaatggtgttggctgaaaattacatgtgccctgataacatatgctttaacagagtacctggtgagtggaatgagaatgtggtggtttgcatgagtaactttgcatttctgaactgtttttcaatgcctccattcatattggtaattgaggtcattgggttagtaaggcaagcaatcagtggcaggaaagcattttcaggcacatagtaggtaactcaagtaaagagtgaaacccttccaaatgattaaaagaattaaaaaaaaaaaaaaaagagtgaagtcctgggcacagctgttagaaatctagacagctggccaggcttagtggctcacacctgtaatcctagcacttgggaggccgaggcaggtggatcacttgaggtcaggagttcgagaccagcctggccaacatastgaaatccctgtctctactaaaaataaaaaattagctgggcacagtggcgggtgcctgtaatcccagctactggggaggctgaggcagaagagtcagttgaacccgagaggcggaggttgcagtgagctgagattgcgccactgcatgcgccactgcactccagcctgggtgacaagagcaagactttgtatcaaaaagaaaaaaaagaaatgtagacagttgcatgacagttctagtattaataacatttatcatcagtgctcttgttcttgatgtatactgatcaccaggtgatgtccactgtttaccagaggaatatcagactctggaaacataacggtaagaagcaaaggagagggggcaggtgatttgtggaggatgctccagctgcctttccctgttctagagkaagggcagctctagatgcagcccttgccctacgtgaaagtgcrggaacactccctgagaggcaggagtgctggtttctcgaagctgtcatggtctctgtgttggtggttatgcctctttagaggtctcctggaggagtgtcctcattgaaactttccctttaggccatcaggccttggagacagggttggcattttacacatctttaatccctgcatgagattcacatttcttcttaggtcaggggatgctgaagccttggtaagctgcagcctttgtcagtagtttttttttttccccacaattattcagggggaaccaatgaactccatgagggtggggattacatctgtctactgttgtatctccagcacttagaatggtgcttggcacctaaaggatgctcaagttgttgaaggaattaatattccctctttcaacagctgagtgtcatagcttgggtctagccctgcacagtcaaggaaaaataaatctgactggattaggacctccaacatctgggaaggatctggagctggtctgctgaaatgagcttagggaaaagttcagaggtactttccctcttctcacttcctcactccgcaatttatgtgtccagtttgattgaatgggattcttcttaggtgcctactaggatgtgagtctcaccattaacctagcccatttggtgatgaaccagattttctgcatagctccttttagccttctcttttcttcccagtggagttggcctcagtgcccggaagccacagctttgtcctgtgtcctggctatccctgaatccacaatggtaccataattttgacagcaagtttcaccagtacccatagactcctatgctgaggttcctgtctatcagaatggattccttagctttggacttttaaattttaagatactgtcttcactttgggcattgcgtctattaccaatatgttttcttagtcccagcttgtctgttctaggcttacttccgcctccctgctagctcactgtttaattcccagcagatctggaggctggggctacgtatggttttgagaaaggctcctctgcttggcacttcacaaggacttccagtaatgagtggcgaaaagatagcgtgactctgttgcttcaatttactcttatctgtccacctttttggagtgggagtctgtcatgactttccctttctaaaccacaaagctaacataatatttcactttatttatttatttttaattaaaaaaaaattttttttttgagacggaatctcgctctgctgcccatactggagtgcagtggcgcaatcttggctcactgcagcttcaacctcctgggctcaagccatctgcccacctcatcctcccaagtagctgggaccacaggcacacgccaccacacctgactaatttttgtattttttgtagagatggggttttgccatgttgcccagcctggtctcgaactcctgagctcaagcaatctgctagccttggcctcccaaagcgttgagattacaggcatgagccactgtgcctggcctaacatggcattttaaaaaatcatagtgttcctgtgatcttattcccttgactaataatttatttagagtggatacatgatccagtctggcaaatgagatggaagtggagctgacttgagagggattcctttcccgaaaaacacacaaaagcaccagagaaaaaagctttccccctcccctttttcaccagcttgaacggggggcattcctggagcagcaggagcggcctcttcgaaatcttgagatggcacacatgaggacaaatgccaatatgccaagcacagcagggtgggaagaaatctgaatccctgatggcatcattttgcagttgaactgatgccagcaacaatccacctctgaatttatgctgtgggaaaaattacctattatttgtttaagcctgaagttgtgttttcttttatttgcaaaagcatgcatttctttttcttttcttttttttttttttttgagacggagactcactctatcacccaggctggagtgcratggcgcgatctcggctcactgcaacctctgcctcttgggttcaagcgattcacctccctcagcctcccgagtagaaaagcatgcctttctaacttgtagttaattttcttcttttaacacatcagtctggtcttatttctaggctttatctcatacgacayttactgkgtcctcacatgcacatactcctggccccaacctctctcaraattttatttttcctagtgtcctagctttgagctgtctacttgttcktgcccaccactggatgttcagctgcacttttctctaaaaggtttggtactccactccaaaaaaaattrtatttttaaaatataggaaacgatgatatatggagsacctactatgtgccaggcaccacaccacatatgttacagacattacctcattcgatcttcacaatcagcccaatgtggtaggtattagcctcctcctccaccatccttttatagcagaggaaacataagcacagtaatgttagagagcttgcgtaaggcctctcagccagcaattagtagagccagttttcatatccaggtctattgaattccccaaaatgctcttgcaattcagggagcaggcttgtatttgtcaggttcttaattccaagcaaagtaatgcaatctagccaatttaagcagaaagggatttgtcttagtccattctgtgctgctataacagaataccacagwctgggtaacttatgaggaacasaaatctattctctcacrgttctggagcctaggacattcaagataaaggcaccaatggttgagtctctggktccatgatgatgccttgttgctgcatcctccagagaagaggaacgctgagtcctcatgtggcasaagtgcaggagagagagaacacactcctgcaagcttgttttatggcaaagttaatccattcaccagggcagagccctcatgatttaaccacctctcattaggccccgcctcccaacactgttgcattggggattaagtttcaacatgaattttggaggggacacaaacattcaaaccatagcattccgccccccatcctcccaaaatatccttctcacatgcaaaatgcattcattccatgccagtagccccaaatgtcctaacttgtttcatcatctactcaaaagtccagagtctcttgttacacggatatggttgagactcaaggcatgatttaacctgaggcaaattcccctctagctcatacctgtgaaattaaacaagtcacatgtttccaaaatacaatggagacaggcatgggatagacacacttcttccaaaagtgagaaataggaaagaagaaagggataacaagtcccaagtaaaagcccaaaacccaacgggaccaacaacattagattttaaggcctgagagccatcttctttgactccrtgacagaccatctggacacaatgggtgagggttggactctcaaagctcctggtggccctacccccatggctttgctgggtgcagctgtcatgggttggagtcttgtgtctgtggctctcccaggctagtgttgcatgctaatggctctacagttctgatgtcttaggagtggccctgwcccacgactttactaagcaatgccctatttgggtatctttgcagtgacccccaatcccacagttccactgggcaaggggatttagaaaacagagttccgagttttccggtatccagagtgcaggatggaaagggagatggggccaatagcgggatccgccaaggcctccttgaggaaggctctttctttacagaagagctgcgcattcagttactactgtaaggcagagagtttagattgcaattcagcagcatctccaaaaaactcgtagtgctagaatggctttgaggtggaattttggaaatgagraccatgatgaatgaatgatggaaatggtgactccttgccatagttaagctgttgtccttaacatttcttttaggtagcacagtatayaagcttacattaaaatattcacggccaggtgcggtggctcacacctgtaatcccagcmctttgggaggccgaggcaggcggatcacaaggtcaggagttcgagaccagcctggccaacatggtgaaaccccctctctactaaaaatacaaaaattagcagggagtggtggcaggcmcctgtaatcctagttactcgggaggctgaggcaggagaattgcttgaatctgggaggcagaggttgcagtgagccgagattgcgccactggactccagcctgggtgacagagtgagacyccatctcaaaaaaaaaaaaaatcmcaaacattaaaaacataagatggtgatctatttcaagtactttgttaatttttttttttttttttttacctattctaagtttccttctggaggaatatggccaaatgaaactttccttgtcttttttttttttttttttccagagacagggtcttgctctgcggcccaggctggagtgcaatggcgtgattacagctctctgcagcctggacctcccaggctcaggtgatcctttcatttcagcctcctgagtagctggggctataggcatacaccaccacgctcgctaattttttatcttcattttttgcagagacagagtctccctatgttgcccaggcttgtcgcaaactcctgggctcaaacgatcttctggcctcagcctcccggtgtcaggattactggcataagccatggcacttggcctccttctctttctacatgagtgtatgaaaaacactcaacctgtgggacatctcttctatgttgctgtgatcttataagagatgttaaataaagggacttctaactagttatgagaagtcttattgaactgaaaggatggggaaatgctttcaaacagttaccaaattcctcacctgagtaatgggcatattttaacaccttaagaaaaaccccgtaagtttcttagttgattattctgtgctaaactgttagatttttttttctcttaaggtcaatgttcattattttagtaccaccagctaagatgacagtttgtcccataggctgtcaaggacattgacaagtaacaaggatattgcttttcttgaaagattctggagagcttttcacccccactcacctgacagcacagaatgtcaatccactggcagggagtctccgagtggcagacggaaggtttcctgctcctgccagaaaccaaataccagagtgaagtcctctctgaattccacacccaccctgttcattcattttcagagcctgtttttcctttgacaacatttctcagagagaactgtgacaagtgtacaaatgaactgtctatctctatttcgcagtacagcaatatgtctactctctgaaatcttcaaacatagcagattctagtccattttcttgatgtattcattagtagctacactggaggttactgaatccaattttcattagtgaatgtccccaaagatgacatgtgcctctctttgcaaaattgcctggttttcataaacttgactacgaagttactttaaacggaatcatgcttttcttattaacatcatcttatagggatttcatgctcataaaaaaaagggtctcaacaggtaagttaaaacactcaagaggatgtagaaaattaagaaaaacttttaaaggaaaaagggaacatcagtaataaaaattttagcacatttcagctaacactgacaccaaattcagcttttgctttggactaaaataatgttatttgaatatcagaggcctagttagtaggcaaccctttaaaaatctcaggtctatttgcctttagcygtttgctgaaaaggagtttttgtttgtttgtttgttttgttttggctgtttgttcatcaatttggtttattttgttaaagatttctttccatactatacaccctgcaactttcagatatttcagaatacctgatagataaaatgttcaaccgctatcttttctgagttttatgccattgttggtgagtctgggactgaatcttttttttttttaatcttttttttttgagacagggtctcattctgtcacccaggctggagtgcagtggtgccagtatggctcactgtagtcttgaccttccatgctcaggcaatcctcccgtctcagcctcccaaatagctgggactacaggcgcatcccaccaggcctggctatttttgtgtatctttttcagtagagatgaagttttgccatgttgcccaggctggccttgaactcctgggctcaagagatccacctgcttcascttcccaaagtggtatrattacaggcatgagccattgcgcctggcctctatgcatatgttgagaagccccagtctgagctcagagatgacctctggttaaaatgagggacttggtttatatctttttttttttttgagatggagtcttgctctgtcacccaggctagagtacagtggcacaatctcggcttattgcaacctctgcttcctgggtttgagagattcttctgcctcagcctccccaagtagctgggattacaggtgcccaccaccacacccggctaatttttgtatttttagtagagatagggtttcmccatgttggccaggctggtctcgaactcctgacctcaaatgatctgcccacctcagccttccagtgctgggattacaggcgtgagccactgcgcctggccagggcttggtttttatctaactctgtagaagatgccccaggaagagcagagaactctataaaagacaaacttgggtttggattctggctcttctggtaatatatcttaactttatgggcaccaattttgtcatctctaaaatagggataatgcttcagagttgtgtagtatgaagtcgaaaaatattgaggccgggtgtggtggtacacactcctctagtcccagtgactcaggaggctgaggaaggaggattggttgagcccaggagtttgaggctgcaatgagctatgattgcaccactatgttctaacctgggtgacagagmgagacyctgtctcwaaaaaagcaaaactgaaaaaacctacaaaaatatttaatatgtacagtttctgatagacactaactctcttttccaatttcmtaagaaacaatgctcagtacttgtggtggttgcmtaaagttgtagaggtgaaaactttgttttcatttccatttaggtcttttttttttttcaaaaatttttttaaatagagacagtctcactatgttgcctaggctggtctcaaactcctgggctcaagtgatcctcccaccctggtctctcaaagtgttgggattacaggcatgaaccactgtgcctggctgactcttgtttttataaacattatatgtcaagatttacacttgcaatgaatctcattatcccactgtatttcttttcttgtggtgatccccaaaacaacaacaaaatcctgcccagtctctacatatttttgaccaaatatatatatatttttgagacggagtctcactctgtcgcctaggctggagtgcagtggcatgatcttggctcactgcaagctgcgcctcctgggttcacgccattctcctgcctcagcctcctgagtagctgggactacaggtgtccgccaccacacccggctaattttttgtatttttagaagagacggggtttcaccgtgttagccaagatggtcttgatctcctgacctcatgatcctcccgcctcagcctcccaaagtgttaggattacaggcatgagccaccgcacccggccatttttgaccaaatattataggcgctttaagatatactacaaacactaagcaatttgctgtgttttttcaaatgttactttttctgattgaactcacttcnnnnnnnnnnnnnnnnnnnntattaaacgctgctgtaggtactacaaacctagtaatttgctgagctttttaaatgttactttttccctacataaaatgttgaaattcatcaaaattcggccagatgtggtggctcacgcctgtaatcccagcactttgggagggtgaggtgggcggatcacgaggtcaggagatggagacgattctggctaacacggtgaaaccccatctctactaaaaataccaaaaaaattagccgggcgtggtggcggcatgcgcytgtaatcccacctactcaggaggctcaggcaggagaatggcctgaacccgggaggyggagcttgcagtgagccaagatcgcgccattgcactccagcctgggtgacagagcaagactctgtctcaaaaaaaagagaaattcatcaaaattctaacacttaaaatgcttccatgactatcattgtatcccaactttgtttttggtctggatagaagccacagtgatgactcagttcattccatgcgccttgaatctattttgctaaaatagacaacagctgagccatatttatgtcctaatctaatgaaccaacagtgcaaaaaataacgctttaaatctgcttccttttttgagaaagaaattcacttaaaatacaatttccttttatattcctccaaagcctgagctgkatgattttttgtgtgtgcttcctaaaaaactttatctctagaggtaaatgctgagttttgaaaaagtttagagcttttgctaaatagactgaagacttgctttcaaatctagagtttgatgatttaaacaaggttcaccaggcgtggtggctcacacctgtaatcctagcactttgggaggctgagaaaagagaatcacttgagcccaggaattcgagaccagcctggagaacatagtaacaccctgtatctacaaaaaaataaacaaaattagccaggtgtgatggcacatgaggttggaggatcacttgagcctaggaggtcaaggctgcagtgagccatgatcattccactgaactccagcttgggcgatagagtgagaccctgtctcaaaaacaaaacaaaagacaaggttaactttttcatcatctgtaaagtggagatgacttcaatgtcacattcctgggtttatgtttgcataactgaagagctaagagcagaaaggagctcttcaagtttggaaggaacggaggatgagaattccttcttaagctggtgcggaatactgatctgctcccagataataccctggaggtggcagtgtttccagtggggacggtcgtggttagctgtgcactgtgctcggagtgctatgttgtggaactgcagggaggccccagacttacagatcctttatcctctacccgacaggtgtagctggtggggatggactgagtcgggggaggaggctcctgaagagcagctaattcttgccttttgcttgattgtggtctaaggacatggaaggacagtgatctgatgatggaacaccgcataaggtatttgttggtgcattttttycttaatactaggtgttttgagataatgccacttgctccrtctcttaatattctccgtgtggattggacatgttgcctgactgttaatgacagccattgggcctcatttcttgattgggtgaagctaaattatcaaaggtcccaagcatgaagattttggtctgtttctacttctctgtcttcccagtccaatgaaggtggccactagggttatgtgtcggctctgcagtaccaagcttgccctcacgtgaggtgttctgaggataggaatagtaaactggaggatagggagttagcaccatcattgggtctttcatacagagcttcatctttcaaattaccctttattagtaataaaagcaatatttgaacctccatttcccttattcctttggattatttttcttttcttttttttctttttttctttgcagttgcaaaatttaatagagtgaaaacagagctcccataaaatgggaggggacccaaaggaggttgccgctccctgcttgaatgtctgggtttatatcccgatcattgtccctccccctgtgctctcaggcgatatatgatttggccatttcctttggattgtttttcaatgggccctgaacccaggtgggaagagaggcactattttttcttttttttttttttctgatacggagtctcgctctgtcacccaggctggagtgcagtggtgctattctggctcactgcaagctccgcctcccgggctcatgtgagaggcactacttataggcccctctcaaagacttgactaagagccaccaggtggaagagtcaacactaccaaaataccacaacctttacacaaaggaggaagagtgaaatgaatattgaacatagttgttaactgacataacatcatttgaacttacctaaatgttaggtttttttrttattattattttattttttatttttatttttttgagatggagtctcgctgtgtcacccaggctggagtgcagtggcgtcatctcrgctcactggaagctcggcctcctgcgttcacgccattctgcctcagcctcccgagtagctgggactacaggcacctgtcaccatgtccggctaattttttgtatttttagtagagacggrgtttcaccgtgttagccaggatggtctcgatctcctgacctcgtgatctgcccacctcggcctcccaaagtgctgggattacaggtgtragccaccgcgcccggcacctatttttattttttttgagacagagtctcgatctgtcacccaggctggagtgcagtggcgtgatcttggctcactgcaatctccgcctcccaggttcaagcgattctcctgcttcagcctcccgagtagctgggactacaggtgtgtgccaccatacccagctaatttttgtatttttagtagagacagggcttcactacgttggccaggctggtctcgaactcctgacctcaggtgatctgcatgcctcggcctcccaaagtgctgggattacaggcatgagccaccgtgcccggtcaggttatttttttgatcgataacgcatattgcctttagttagaagtgggtcacagttagctactccccacccctgagtacccggttataatgaaagcaaggtttcgacaaaattaggccacccatatatatttgtatagagcatgcgcttatcagcaagcaagcacacaaccgttcgtacaacctgctcatttttttttttttttttgagatggagtctttctctgtcacccaagctgtagtacagtggtgcgatcttggctcactgcaacctctgcctcctgggttcaggtgattctcctgcctcagcatcctgtgtagctgggattaaaggcgtctgccaccatgcccagctaatttttgtatttttagtagagacgaggtttcaccacgttggtcaggctgatctcgaaatctcgacctcaggtgatccaccctcctcagcctcctgagtgctgggattacaggcgtgagccatcgcgcccagcctttttttttttttttgagatgaagtttcgctctgttgccaggctggagtgcagtggagcaatctcagctcactgtaacctctggctcccgtgttcaagcaattttcctgcctcagcctcccaagtagctgggactacaggcgcctaccaccatgctcggctaatttttgtatttttagtagagatgggatttcaccatattggccaggctggtcttgaactcctgaccttgtgatctgcctgacttggcctcccaaagtgctgtgattacaggtgtgagccaccacgtctggcctaccactaccaattttaacactggaaactcatttctaacataatgatgctaactttattttattttattttattgagacagggcctttctctgtcgccccggctggagtgcagtggcatgatcacagctcatgcagcctcaacgctctaggcttaagcaatcttcccatctcagcttcctgagtagctgggactacaggcatgcaccaccatttctggctaattttttaattttttgtagagacagggtctccctgtgttgcccaggctagtcatgaacacctgggctcagtgatccctcttctcagcctccaaaagtgctgggattacaggtgtgagccactgctgcgggcccatgctaactttaaaagtctcaggtgctcattaaagagaaagcacttgtagcagctgccccaagactgggctttctgattagcatgctgggtggcttcctgacggtagaggggaatccctaagaaggacatttgacccacccacacccgcatattgcaaaacacacagcttctgaaatggtaaatggctggctcaatatctttgcagtcccagttataaaggctcatcaccttttccatgccagtatatagaggagaaacacaataacaagtttcttatttccgtacgtatttgaactccaatgtgaagaaggtgtaacatttataaaacaactacatattttctattcatgatttgatcatctattttgttactctttttgccttccctttcaatgtttgaacatattccttattataagttcagttgaatgattcgggattgacctatttcccctctcctgctcccatcttttgtaatttttcctaaggccaactggtggccatagttcaatttcccactgtaggctaggttgactcttatcattactataagatgatccaccttattactataaggtgatctgcctgctttggcctcccaaagtgttgggattataggcgtgagccactgagcccagtcaggttatttttttgatcgataatgcatattgcctttagttagaagtaggtcacagttggctayagttagttactataactgtcattccacaggatcctcctaactcaacttattctgtgtcctgttttttcaaaaaaatcacagaattttgcacaggctttgaacatgttaacccatgtcttcaaaaatgaatgaatctacaagaacccaagccatgcactggcgagctcaatgaagacatacgaaaatcattccctttggtctcaaacatgttccattagagattgtttgcacctggccgggcgctgtggctcacacctgtaatcccagcactttgggaggccaaggtgggcggatcatctgaggtcaggagttcgagatcagcctgacsaacatggtgaaaccccatctctactaaagatacaaaattagccaggtgtggtggtgcatgcctgtaatcccagctacttgggaagctgaggaaggagaaatgcttgaatccaggaggtggaggttgtagtgcrccgagaccatgccattgcactccagcctgggcaagaagagtgagactccccctaaaaaaaaaaaaarragagagagagagattgtttgcayctacaatgttcattttcagcctccatccagaagagccaagtatggtttggacctaatattatgaagtaaatagctttaaacatggtttggtggattaataatggagccatcactcggcatccattgtcctaggctgtatatatatttggaaaggttgctaagagagcattctctttagggcaaaaggtcaaagtaagtgtagcttgacaccgacaccttcctggtgacccgagtttcttctgcccacctygttttctgtgaggagtccttctgagctcatacgcctggtcttatggaaggaagtggctttgagtgcacctctacctgtctatactcagccagagctgaagggtggaacaggtatatcacggagaatattttccacgtaacaagatgggtaataaatgcatcagtcttgccttagccacatgcgagatggagccagcctcactcacttatctcatcagaatttggcccatcacattcatgtaaacaattaagaggggccaggatttcttcagttttgtcttgggggtgagtaatagaatctctggtcctgaggtgaaaaagtgatttttaaaaattagttggttatgtygtgatatgagttatcccccagcccaccctgtccacattgctcaaccagatttcttcccttggggccctgcatgttcagcttcacgatatcctcccatagtctggaaagcccgtccctcatgcccttggtatttcatgttttgtgtagcaattgcttcagttgtccattccaatttttcagttgtactaaatgcttcaggagtgatgtttagaaacatgaaaaaaaaatcaccaactctgttttttttttcacgtggctcatttgcatcgcgtatgccttaaaatgcattcattagcttgttgctttataagttggaggtccattttggaggcaatccagggtttctagtctttttatgcttttgtgctcttgatgtgactgagggcagacaaggcttaaaccagaatcattgtcaaaaccaattaagaaaagcctccaaagtctcccaatgcaatggaaaaagccagatggaactgacatgccagttatgccccaggctataccctcacaggatgtggccactgaccaaagggaattgttcctgttgtgtcttaattgagctcacagtgcatggcttggctcctgcagatctgctcattctgaggacctgggctgccaccttcaaagtctgcacagtttattgttccagccaccagcactctctctttgggctgtgactggtcgacagcgacgtgaccaaaccattcttgaatcatgctagcaggcctttatgtgagcagtgtgagcagggcctacctgaaagagctgatagagctgttgatggcactaaatgagacaatgtgtatatagttcttagcacagagcctggaacaccagagttgttcagtaagtgatctgtgattatctnagaacacacatccccacttcacaacttggttccaatatcacctgttctgtgaaacctcactgacaacactcactagcagaggtaatgaaaaatcataggagttgcttcaacttttcaccttacaaagatctttcacctccgtcatctcacttgatttctgtgactgccctgtgmagttagtattattattattctcatgtgacagatggtgaaaccgaagcccagtggggttaagtgactttaccatggccacatgggacatgaatctaagtcttgtgactactagtccactgttttatccattatagcattttggtagagaacgtgacttataattygtagacactcagtgaggataggaggaagtagtagaaagtggagtgagagaggaatacctggcctaggaaagacagttcagagttgacaaacatcgtttatcagctgtaaggcctcacgtaaggtgtataacttctctgtgccttcatttcctcaccataaaatgggaataataataataatattttattattacccttagtatcctggggcctggggtgttgtaaggggtaagtttatctatctatctatctatctatctatctatctatctatctathtatccaaatcatgtttgtgtgtgtgtgtgtgtttttttttgagacagggtcttgctctgtcatccaggctggagtgcagtcacacaatctcagctcactgcagtctcaacctcctgggctcaaatgattctcccacctcagcctcccaaatagctgggattacaggtgcgtgccaccatgtctgggtaatttttaaatttttctacaaatggagtttctgctatgttgctcaggctggtcttgaacttctgggctcaaatgatcctcctgcctcagcctcccaaagtgctgagattacaggtgttagccaccatgccctgctgttattttttttttaagttagagaaaagcacaatggaatcaaccttcaagtttgtttaccaaattaaaaccaagagtttgtaactgtgttctcctcagtcacccagaaactctagtagcacattaaagaagttgtatataaggcttgtgtcgctctgtccagcatgtgatcatgggctgcccacagtatattttggtactcagtatcctcatgaaaataggctgagatacccagggtccttattaggagaaatcagaatactattatggcatgtgctttgtacttattaaattttttttaaaaagaacaggctgggtgcagtggctcaagcctgtaaccctagcactttgggaggccaaggcaggaagattgcttgatcccaggagtttgagaccagcctgggcaatatagtgagacctcgtcactacaaaaaataaaaaattagctgggcatggtggctcacacctgtagccccagctacttgggaggctgaggtgggaaaattgcttgagcctgggaagttgaggctgcaatgtgttgtaatcgcaccactgcactccagcctgggtgacagagcaagactctgactcaaaaacaaacaaataaataaaataaaataaaatataaataaaaagaacagaaaaagcaaaaatgtcaaaaaagagaactaagaagttgagctgggtgtgcaaaacagtgccaaaccatctaacttccctccaccagcaatgagagaaagcgttttaaactgaaatgatttagtagctatactgattggtttgacttggtttrataaaaatgatctgtgcaagctggttccatgcccatagcatcagctggggttccatggcaacaaaaataattactcatctgcaaacagtctttgtaacagctaagggtttgattagcatcttaaaattactttgtgattcaaggaattttatttcccacttaaagaacaaaacaatgatgatttttttctggaattggtcatgttttaaaagaacaagaggagacagattatgggtatgttcttctataaactgtgtttagattttakaactgtgcatccattctcagctaatcagatgacagctcactctgcaggactcacatgctggtctgatcgtttacgtgttcttggtcaccctttttctgtttctgcctgtgaatcttacctctttcaagcccctgtactccgactccctctcagcagatgactggagacagaaaataagagtccatcatcttatttaaatagattaaaggaaacacaaagaccgcaatggaaaaattgcaaaagatggaaagrgaagaaatagaaataataaataaataaatgtagtggtttgagtcasaaggttcgatctcattagttaccaataaaatgtacattggaaggacaataagatgatactccttttttacctgtcaaattggcaaagagtcttttttttttttctccatctgtcgcccaggctggagtgcagtggcgcgatctcggctcactgcaagctccgcctcctgggttgacgccattctcccgcctcagcctcccgagtagctgggactacgggcgcccgccacctcggctggctaatttttttgtatttttagtagagacggggtttcaccgtgttagccaggatggtctcgatctcctgacctcgtgatctgcccgcgtcggccttccaaaatgctgttactacaggcgtgagccaccgcacccggcccaaattggcaaagagttttaaaagtaatagcattcagcattgataaaggcatgggaaagstggagctcttttccactccaackgatacataaactagttcacagccttcaaaacattcacactcttggacctagtactaactctacttggagtgagttagttatacaaggttaaactccaataataggagaatgattacaacgacttctttgtaattattttaaaatttcttttaagcgcttaaccacaagctagccacacatctgaggtccttacatgtattttgtcatttaatcctcatcagaactctgtgaagcaaatactgtatttcctttttatggaggaggaaactgaggtacagaaaaaatggagggacagtggctctaatgccagaggcaggctctgaaccagtatgcttaactgcctagtttcagaagaggcttaaggcagcaggcggagctgtataaaatacaagataatctcaagtattcygtaggagagagaaaaacaatggcaaagacagacataaaacagagccaggaatgaggccaaaaatatatatcatttgacctatacacttgctaagaggaccacaaatttggctagaagctttctagcagcctgtggataaaaggaaatctgatcagtcatacaatttacagtatccataagataaaagcaggccaattactcagaagaagccaacgattctaggtagtaagaccagacatagatttattctgcrgaacacaaaatgttcttgtaaaaagagacacygtgtgagctaatggataatgagctcaacagcatccttgtttagacaagrtgaccactgatatggtttggctgtgtccccacccaaatctcatattgaattgtagtttccataatccccacgtgtcatgggagggacccggtgggaggtaactgaatcaagggggcagttacctccatgstgttctcgcgatagtgagttctcatgagatttgatagttttataagaggctttcggctttctcccttttgctstgcacttatccttgctgccaccatgtgaagaaggacatatattgtaagtttcctgaggcctccccagccatgctgaactgtgagtcagttaaacccctttccttgataaattacccaatctcaggtatgtctttattagcagtgtgagcacagacgaatacaatcacttccastgggttgagtcttctagcttttctcttakggcttatggcccaacatcaaaacatggtaacaagcaacaaggatgtggctcaggcacccasgtccctactgcttgggggatcgtagggtacctgagagtgagtggactgatagcctttgatagatgctgtgagaaatgagagactgagattgtgcttttcaacaaatatgtagaattcatcttttmtattttgtaagcccccccaccttttttttttgagacaggatgttgctctcakgctggagtgtggtgatgttatcttggctcactgtagcctccatcttgccaggcttakgtggkcctcctacctcagcctcctggatagctgagactacaggcatgttccatcacacctggctaattttgtattttttgtggagatggggttttgccatgttgcctcagctggtctcgaactcctgggctcaagccatctgcctgccttggcctcccaaagtactgcgtgtgagccactgtgcccagcctattttgtcagtcttttatgcattaaagaccattatactagagacaggaaaggtgaaaaatattgtaatatgaaatgatcaattatataggtgttamacatgatgtttaggatgtcttttggtaatatgaaaatgttctcaaactatagtattaaataaagcaggatacaaaactgtatgtaatatgtaatctcmacaatgtttmacatatatatggagctgcagtgagctgagatcgtgccactgcactccagcctgggcgacagcaagactgtctcaaaaaaaatttatatatatggagcaaggtctgaatctttagtttttcttgctatagaaattttttttcttttatttactgaatagaaagatgaaagmcaatttctggatgggttggaatatcttagaaagaggcatcagttttcaggtactaattgcttgggttctaggtatgmccgmccatcaaaccaaggggaaagaagaagaamacagttttgatttgatttgattaggaagcaggcatgtatatgatgaggcataaagmccatgtgggggaaaaaactggggagaaacgtagcaatgtgaaggatttccagaggggcctttagaaacctaaaaagctaatctctgaagttgtccatgagagagagagcccagagctaggagatttctgtccccaggagaggtttgggagctgactcctcattccctgtcagacaggccttcacctgaatggcaacctgcccattaccaccaccccagggtctaccccaatctcttctcacagagatatggagagggccttgctccttcctgaacttgcattaaactgacaattgcctcaccacaagactctgttgggttcatcattcattaccctgtatgagcatcctctgtaaccatgccctaggacatcagtatgacaaaatagggccggtaaggggaagctctttatatttaaggggaagaggctaaactaacaagcttgagattattttaatagcatgcacacacacacacacacacatatacacaaaatactgcaagaactacaccttcttcaagaatctcaccttacccttttccctactgctccttaaatatgggtattgcctcaaattccttctcagtcctttcttttcattctagattctctccttgggctatttcaacttccatacaaattccgatatgcattaaatctcaaatctccgttatgagtctccttaaattacagtctaaggacatccagaacagagtttccacaccaaaggcacatctagtttctcatccacaagctttttatctttgtctttgtgtttgttttttatwccggaacttcttgacaaatattattccatcatcagaaggaaggtcctgggaaaaagaaagacatgagcacttgtgctaggtattttacaggcatatcttcatttaatccttataacctctctatgaagtaggcataattgttccttattagcaaatgaggaaaccaagactttgagcagataatttgtataagatcaaatagcttggaagagtaggatgactaagttttaaagtcaggtctgtctattcttctaagaaaagaagactgatgctttcctgttagggaaccaacttcttattcccaggctgtggaatactgtgctaaccaggaaatagccaattcttccttcagggcatgttatgagatacatgaattgttttctaagtcacaatagccttttttttycttttctttttttttgcttgctttcttttctttttctttttttctttttcttttttttttttttgagatgaagtcttgctctgtcacccaggctggagtgcagtggctcgatcttggctcactgcaatctctacctcccaggttcaagcgattctcctgcctcagcctcccgagtagctgggactacaggcacacactaccatgcccagctaatttttgtatttttagtagagatggggtttcaccatgttggccaggctggtctcaaactcctgacctcaggtgatctgcactcctcagcctcccaaagtgctgggattacaggtgtgagccactgcgcctgccctttctttctttctttctttttttttttttttttttttttgagatggagtttcgctctgtcacccaggctagaatccaaggtgtgagctcagctcactgcaacctccacctcctgggttcaagcgattctcctgcctcagctcccgagtagctgggattacagatgtgcaccagcaggcccagctaatttttgtatttttagtagagacggggtttcaccatgttggccaggctagtctcaaactgctgacctcaagtgatctgcccattttggcctcccaaagtgctgggattacaggcgtgagccactgtgcccagccacaatagcctttttacctaagttttactttagaatcctgagtaaaagctgtgaccttctagcttcatctactctctgacattccctgaaacctcagcctgtgtggcaagttctattacaggattcacatttcctgatttcaaaattactacacagcaatggtaaacaagacattgtggtaacmccataaatagtgtgatggtttgaatgtctgtgtcccttccagaattcatgttggaagttattccccaatgcaacagtttaagaggtgagacctttagggggtgattcaggcatgcgggttctgccctcacggatgggattagygctttataaaagggacatggggaactagcctaggccytttttttttttttttttttttttcgcttctgctcttccaccatggaaracacagmaggaaggtaccmccttggaagcagagagcagccctcgccaracaccaactctgctggcaccttgatcttgtacttcccagcctctagaactgagcaraaatacatttctgctctttaattacccagtctcatgcattttcttatagacgtctgaatggactaagatcgatggacatatagaccaatggaatagatttgagagtctagaaataaacccatatgtctatggtcaagtgacttttgacaagggtatcaaaaccattcagtggggaaagaatagcctttcgacaaatgatgctgggacaacaggatagccacctgcaaaggatgacattgaaccctcacctcacacaatttaaagaaattaattcaaaatgaaccagaaacctaaatgtaagagctgaaactaaaaaatttaaaaaataaaacaggtctaaatcttctcaacctcagagttggcaatgatacgacactaaaagcacaaacaaaagaaaaaataaattggacttcatcaaaattaaaaactttcattttttaaaggaccactttatttatttacttattattttgagacagaatctcaccctgtcacccaggctggagtgcagtggtgwgacctccgctccaggttcaagcgattctcctgcctcagcctcccaagtagctgggattacaggcatgcaccatcacatccggcttatttttttatttttgtagagacagggtttcatcatgttggccaggctcatctccaactcctggcctcaagtgatccrcccacctcagcctcccaaagttctgggattacaggcatgagccactgcgcccggctaaaggaccatttaaaaatgtaaaaggacaatcccctggatgagagaaaatcattccaaatcaaatatctgataaggggcttgtatmtagagtatacaragaacccatacattcagtaataaaatgataactaactcaaacaatagacaaaggatctggacaggcattttgccaacaaagataaacaaatggccaagaaacacataaaaaagtgctcaacataattagccatcatagaattgcaaatcaaaatcgcaacaaaatatgctactttacatctactagggtggctggactcaaaaattcagatgataccatggttgtcaaggatacggagaaatcagaccccttgtacactggtgttgggaatgtaaaatggttcagccactttggagaacaatccagaagtccttccaaacatgaaactttgagttaacacatgacttagcaattccacttccaggtatgcccaaaagaaatgaaaacatacgtccacaacgaaagttgtacacgatgtttataacatattattcataatagccaaaaggtggaaataacccgagtgcccataaactgatgatggatgcaaaggtggtatatctaacaatgcaatattattcagccataaaaagtaagcagtggccgggcacggtggctcacgcctgtaatcccagcactttgggaagctgaggtgggtggatcaccctatgtcaggagttcgaggccagcctgaccaccatggagaaactccatctctactaaaaatacaaaaaattagccgggctttggccgggtgtggtggctcatgcctgtaatcccagcactttgggaggccgaggcggctggatcacgaggtcaagagatcgagaccatcctggctaacagggtgaaaccccatctctactaaaaatacaaaaaaaactagccaggcatggtggcgggcgcacacctgtagtcccagctactcgggaggctgaggcaggagaatggcgtgaacctgggaggcggagcttgcggtgagccgagatcgcaccactgcactccagcctgggcgacagagcgagactccgtctcaaaaaacaaacaaacaaacaaacaaacaaacaaacaaaaaattagtcgggcgtggtggcgcatgcctgtaatcccagctattcaggaggctgaggtaggagaattgcttgaacctgggaggcggaggttgcggtgagccgagatcatgccattgcactccatccagcctgggcaacaatagcgaaactccgtctcaaaaaaaaaaaaaaaaaaaaaaggaaagtagtatgatatatgctacaacatagatatattttgaaaacattatgttaagaaagaagccagtcacaaaagactacatattatgtgattttatttatatgaaatatcaagattagggaaagctatagagacaaaaaatagtttagtagttccttaggactggggtaatggggtggaggatggggatgggataggaggatgacagctaaagggtactgtggggaaaagcaagagagatcagattgttactgtgtctgtgtagaaagaagtagacataggagactccattttgttatgtactaagaaaaattcttctgccttgagattctgttaatctatgaccttacccccaaccccgtgctctctgaaacatgtgctgtgtcaactcagagttgaatggattaagggcggtgcaagatgtgctttgttaaacagatgcttgagggcagcatgctccttaagagtcatcaccactccctaatctcaagtacccagggacacaaaaactgcggaaggccgcagggacctctgcctaggaaagccaggtattgtccaaggtttctccccatgtgatagtctgaaatatggcctcgtgggaagggaaagacctgaccgtcccccagcccgacacccgtaaagggtctgtgctgaggaggattagtaaaagaggaaggaatgcctcttgcagttgagacaagaggaaggcatctgtctcctgcctgtccctgggcaatggaatgtctcggtataaaacccgattgtatgctccatctactgagatagggaaaaaccgccttagggctggaggtgggacctgcgggcagcaatactgctttgtaaagcattgagatgtttatgtgtatgcatatctaaaagcagagcacttaatcctttacattgtctatgatgcaaagacctttgttcacgtgtttgtctgctgaccctctccccacaattgtcttgtgaccctgacacatccccctctttgagaaacacccacagatgatcaataaatactaagrgaactcagaggctggcgggatcctccatatgctgaacgctggttccccgggtccccttatttctttctctatactttgtctctgtgtctttttcttttccaaatctctcgtcccaccttacgagaaacacccacaggtgtgtaggggcaacccacccctacagggtacaggtgattaaagtggacaagggcagccactgagagagctggtatccaagcagcttggagatgaagtcstggccccagaaggcactggtgtgraagccacayatctcccttgaragtgcatctggaggtctcastatgtgaagtgctcttraagggaagatttcccaccggccattcacagcagagcaccccagtgccccacagatacaccctctcaktgtgtgttatccctgccatcatttctgggsacatggagttgtmtgattaggctgtctccacatcttaaattttttgagatggagtctcgctctgttgcccaggctggagtgcagtgccacgatcttggctcactgcaaccaccacctcccaggttcaagcaattctcctgcctcagcctcccragtagctgggactacaggtgtgcgtcatcacacctggctaatttttgtatttttagtagagacagggtttcgccrtgttggccaagctcatctcaaactcttgacctcagatgatctgcctgccttggcctcccaaagttctggaattgcaggcatgagccactgcgcccagcacacatcttaaatttctattcatgctgtaatccactacaacctggtatctgccttctctgttccacacaaatgaatcttatcaagagcacccacctccatgttgccaaatccagtgacattttgtgtccttatagtacttggctgtgacctcttgttggcactgacttggtccttattccctcgctcctcatacacacttctcttttgttacctttcaaatgtttctctcctgattttccccccacccagtccctctcaactctctttgctggcttttcctttccaactcaacctttaatagggatacttcagggctagatcctagacccctttctcttctttatttacatctttccctagataatcccatctgttttccatgggtttcaatgccctctaacgctagtgattttcaaagcaaagtcatcatacctcctaagaagtctcttcttaatttttgtcttacatcaaattattgacttaatatttctattcaaatatctcaaaagtggctgggcacggtggctcatgcttgtaatcccagcactttgggaggccaaggcaggcggatcacctgaggtcaggagttcaagaccagcctggccaacatggcaaaaccacgtctctattaagaatacaaaaattagctgggtgtggtggcacatgcctgtagtcccagctacttgggaggctgaggcaggagaatcgcttgaacccgggaggcaaaggctgtagtgagccgagatcacgccactgcactccagcctgggcaacagagggagactccatctcaaaaaaacaaaacaaaaaccccacaaatgtttcaaaagtgtcttaagcctaatatgttcaaaatagaactcttgatttcttaaaactgttccatctaactaaatggcggcccgtcttcccaagtcagaaaattagaatttatttatgattccttttttctccctatcccacattcagtcttcaaaaaggtcttaagaattctactctcccattccactccttcctcaatataaatccatgtacttcttttcccagctgctatcayctcagtctaggccatgattttctttttcctggacaactgcaacarcttcctaactagggaccctacttctatcttttgatatcttccaacttttttgtgtgtgcagtagaaaaattttaattaaaaaaattttttttgtagggacggggtttcaccatgttgtccaggttggtcttgaactcctggaatcaagcaatcagcctgcctcagcctcccacagtgctctgggattacaggcgtgagccactgcatccagctgacattcttaaaatacaaatagaactatttcatttcctgactaaagaatcatcaaaggcctcccctgagaataaaacccaaattcttcattctgacttgcaaggcaagtataattcccgcctatctctctgatgttgcctgacttcttgatatagtcttaggccatttcccttgagcttcttaatcctcagcctctttcattttttttttttttttatttgtttttgagacagggtcttgctctgtcacccaggctggagtgcagtggcacgatcatggctcactgtagccttcactgccaggctcatgggatcgtcccacctcagcctcccaagtagctgggactacaggtatgcaccaccatgctcgttcgattaaaattttttttttttttagtagaaatggggtcttggtatgttgcccaggctggtctcgaactcctgagctcacataatcctcctaccttggcctcccagagtgctgagattacaggcatgagccactgcacccagcagcctctcagatttttattctttgcactcaacaagctcttttctgcctttggcttttacacattatttcctttccctgaaaagcttctcccccacattttgtatatccgactcctttttgttcctcatagataataaaatgaatatcacttcttcagagagatctcyactgattatctttttttcttctttctacctaaattttatccttgtttttcttttaaaacttttaaaaagcacatataaaatgcttatgtgtgtgatactattctattcacaacaatctcataattagattatattattatctcctttttagatatgacacaactgagaaacacacagctagtaagtggcaaagttggatatgacccaagtagactagcttgtgctttttttttttgctttttttcttttcttttttttgagacggagtctcactctgtcacttgggctagagtgcagtggcggatctctgctcactccaacctccaactcccgaattcaagtgattctcctgcctcagcctcccgagtagctgggattacaggcgcccaccaccacacccagctaatttttgtatttttagtagagatggggtttcaccatgttggtygggctggtctcgaactcctgacctcagatgatccgcccacctcggcctcccaaagtactgggactacaggtgtaagccaccgagcctggcctttttttcttttcttttggtgagtcttgctttgtcaccaggctagagcacagtggcacaatcagtacattgcagccttaatctcttgggttcaagccatcatactgcctcagcctcctaagtattggggaccacaggcatgtattaccatgcccagctagtattttttaattttttgtagccatgaggtctcgctatgttgcccaggctggtcttgaactgctggcctcaagtgacccttctgcctcagcctcccaaagtgctaggattaccagtatgagccaccacacccagcctaggaatgctttaagaaattattttctatatacctgtcattgatatatatgcaatacatatggcatatacgaaaaaagagggaactgtaactatgcagtactggaacagcatggtgtataggaaaataaatttggctgggcatggtggctcacatctgtaatcccagaactttgggaggccagggtgggaggatcacttgatcccaggagtttgagaccagcctgggcaacatagacagaccctgtctctacaaaaatttaaaaaattagctgagtgtggtggtattcatctgtagttccagctactcaggaggctgaggtgggaggatcgcttgagtccaggaggttgaggctgcagggagtcatgatcatgccactccactccagcctaagtgatggagaccctgtctcagaaaaaaagagaaaaaaaacaagaaaataagtttatcttctttacgttaaataccaacatttaaggatcaaagttcaactaagcaacatcttaaagtgtcagagtgtgcaagacatgcctgaaatcagacaaaagtgacaagtgacaaaagtgtatcaatcagaaaaacggggcaggatagagcataggggctggaccacaatggaaatttagcaaaaaggaaagtcacagaggcaaactctgttcttagtttgatccaaaggagagggaggcacaggcaatctagtgcgagtcttatgatccctttggaaggcctatgcttacagtttgtagagtgaggaacagccagaggcttcctgggaaggcaggttagctacctgcaattgcaggttccatctcttttcagcagttcatcatcattcatcaacgtgtcagaggtcagatgccacgggagcacacaggaggggcttcccacctggagtgcgagataaggaaagatgggtcggatgttgtagtcattatcatccgcttctctacaaggctggaatttatggtggctgcacatttggaatgttttctccttttatttatttatttttagatcagacaatcacaagagamtattcttttgttttatttttagatcagacaatcacatgagaatattctgttgtgatcgctggcgtttagaaggaaacttgtctggtttgtgaagcaatggaaaacayatccagacagcctgctagtggaaactttggaagggcactgtcatatgctttttctcccacgccatcaacaagtgtcctttttttttttttttttttgagatggagtctctgttgcctaggctggagtatagtggtgccatctgtaccctccacctcctggattcaagcaattctcctgcctcagcctcccaagtagctgggatcacaggcgtgcaccaccatacctggctaatttttgtatttttagtagagatgggatttcaccatgtgggccaggctagtcttgaactccggacctcaaatgatccatccacttctgcctcccaaagtgctgggattataggcgtgagccactgtgcccggtcaacaatcatcttttttttttttttttttttttttttaccaggtacacaatgatgggagagttgagtcctgctttctaacttaraaaacgcatgtgtgttcatcacctggtcactgaraaacagctctggaataggtgccatgcagaagaagagagggaactggaaagacccactgatctgtgggtctcacagcctcccgttacacaraaattgcttcttttctctcatgttgcgttcttcctcttgattctcgacccttctccactctttcatttactccactcttactttgctttcacctccttttgtaaccgttcatcatcactcttcatatggattaatgkgattatcttaaaagcatgtaatatgtagttgctgggtttgtatgagtaatgagtgaacctgaagccaacataatgatcccgtttagtgctcccgagttaagattccagagttgcctgactttggacaaatcacatctccctttgcctttcaccccctgtaaactgaggataatggctcttacctcaaagcattgttaggattggagagaacgcatgttacatacttagaagaatgcttggtatgggtctcaagaactcttagctcttattgtttaaaaaatgcttattacagggcatcgttggtatcttatatagggaatttcaagcagttttcctttattgaagacacagagtaaggtgctttgatggaaactattggggcaagatatacagtacctagctagaggtttcctgggtgcatgtattgtggagatattttttttctgagtggatagcgctcttgtgatacgctgggtgagggcgagcaatatttagcggactgtcctgtgaggatagtaaggtyatctggtgagagtgttaggtggcccaggccagacttgggagaggcagggagagagggggacgacggaggagggcgccttggggtgcgtcttgaaagctttgggaaacccagcggtcttttgggggcaggtggcccaaaaagccttctgcgcgcccaggggacgaggaggatgcgcggrccgcgaccgcgatagttttgtttgcttttctcgggagaaagcgttccaggcagtttcctgagcttcggccctcgacgtagcaaaagagcccgggcgcccacgccgctctcggggtcttctactgccaccgggacaaagccctgggaggagctcccgcccccgcgagccggacagggcggaggctcccccgccgcgcgcgccccaccgcttcccagtcccrgacccgtcgcctgcgcctcctcctggcgcgcctcacggtgcagcgggcggcggccccgcgcgccckgcgggaggcgcctcgggatgtttccgtctggtccttccctccgccccccgcgctgactccatccgctccccgccccctgctcggagccgccgccacgcgggaagggagggagccggccccgagactgcatcattccgcaccggctgctgcagggccagagggagcaggtggagcgagagagcgagccgcgagccrgagcgcgccagacccagggcgagactgcagtgacgcggcccgggagacatggcggacgggcgtctctgaataagcagaatccggagcccctcsctacccgcggccgccgcagcccgggccatgccgcacggctgctgaccgcacgcaggggccggccccgaggacacatgcggcggcctttgccgcctcgcccctgaccctctgccctgttctccatgttgcatttctcgtcagtttctcgggcggtgtagctgccgctgccaccagagccggcggggcatcgcgctgctcattcatccggccgcactttcttttccgtttccacccatcccttcccatttccttctccctttccccgccagcttcgcatccatctcycccaccccgtaaccccctcctgcctccatccaccggggctatggccgcagaagaggtattgcagacggtggaccattataagactgagatagagaggctaaccaaggagctcacggagaccacccacgagaagatccaggctgccgagtacggrctggtggtgctggaggagaagctgaccctcaaacagcagtatgatgaactggaggctgagtacgacagcctcaaacaggagctggagcagctcaaagaggtgagttgcctgtcacctctccctttcctggccctcactccccccacccgcaaggcccactcatcatgatcaagaagtcataaaggagktgattgaaaggactgttttttcttctagggccctttgttggtaagagaagattgaaagagtccattgtttcctcccccaagagaaaaattgcctaagaaatgaatatataagctggaatttgggaggcaatggctgtttggcctgcgggggagggagattagtaagagtcatcaagtctcakcactctaagacgacattcaagtgggttggaatgtataaatcaaacttctcaaaaccgctgttatctcaaacccaggtttcagcgacaatttcgtagtccacaaaagtgatgaggtttgtgcctgaggacccacaatttcaggatttagactgtgtggcacctcagctttcctctggatgtaaccactccttggtgagagagggaactcctcaccaatcccatttgacaaaggctaggcaatcttcattctgcttggctttagtcattcttgtcattgggctgcagaagaaaaacaactttgctgggtgatcccactgccttgatttcacctcggagcgaggctgggccatgtccaagtcttatgaggtcaccctgactagaaaaaattgaactcacctacaaatagtctgaaagagtggtgtatatcaaatacgtgggtagtgttgcatttcaaatgaggctcttctggttgaaatgatayatttataaraccagaatatcamaaatgggtgatgtataatgtctctttagttttttggtatttggcctcttttaaagcctgtcggatgtatgggagaaaacaatgaacgtgctttgatttcctatcagtcactcttaagaacatacatattgtttaagtaactcggtcttttttatctgattcttgagrcactatgggtagcaartaaccacttacaaatttaaatgtaatatacactccttttctgtgtgtcaagtccttatttttaggtgcatattgacatttaaatgttaattattgtttggcatataatatcaaaaatctattatttattttatgctgttacagttaaaagatgtgatttatgacatactgaatcaacttgccttccaatttagtgtgtaatatggtaagcatttatacttttagatatgtcttatttttatttggatgcctgtctaccaaaaaataaatgtactacctatgattaaaaatcccaactaggaatctaatttttgtgtgtcaggctgtaaatttctggttcctattttacttaccatgtacctgtctggtcttaacaacagctggacttgtttatattttccaacttagattaggctgacatgtttaaatgcagtgatgctaaaccttgtgaartgaggaarcasgatgatgactgtcattctcagagatgttttgatattgtctatacctatcaacactgctttgccaagatagggaagtgcaaaccagaaastggtaagccatcaccttcttgataaaggagatggacttaatttaatgaaatgtrcctcttactgactytgctgcttgatttaaacaatccttctagggatatttctgtcattgcacttaccttgcatagcaaaccttaatgcaattgtgttttgcctttgctacaccatgagctttgcatcccaagtctttaacacaaaagmtagcacacagtgggcatgaaatattttatgaaagaatcagtttgtactagaagaaggcacacttttatcargggttcactagtcaatattgattagtgttagataaatactaagaaaattaggatgtataggaagtgacagatgttaataaaactacctgtattagtttcaccagcagtaatgagaaaaatgtgaaaaaaacgttttgtaggaataatgtaactgtggtttcttaatacagaataatgcaaataccaactaaaattttttmtataaatattttaatatatattttgttmtatatagcaggaggttaataaaaatttaccagcattatttttactaaacgattcttgttcatatatttattttcagttgcatttagcataagtgaaattcgagattcctaaaaaactggtttayacagttatataaaaatgtattttaggtaataaaattattatagttgattatttgatagtgaggcctattatttttattctttaaacatagaatatactttagttggaaatataacttaaatgagttaaattgatttcaagtaacatttcttgtatgaaaagtaaatccaaaataattgtgcaaactgaggtgttccaacacctcagttttgaaaaatattttgtgagtgttttgatttttcaaaagaaagttttgctcatcaggtatgtatagtaaatgatgttgcattatatctataaagccaagcataaaataaatctttgcttatttctaggatttttgaacaaatatgatttatttaaaaataattgaaccagtttatgggaatgtcaacagaaaactactgtattaagtccaaattggacattagtaatttgcartatagcaacatggctcagtctttgcagatcattttgttttccagagtcagtacccaccaatgttgctaccttccttcccaggctaggtactgctgtgacaataatgcaagtcggcagtgttgcctaaagatgtgcaaaatcaagaagatgaaattcattaaatttttttcctagttatttcttccctcaactcaattgttttttgacctggcctgatgttgtttagtgctctgcatggactactgtaattcagctcacagaagaacacacttgaaagaatagtactaaggatttgaaaaaaggatgacttctgacatcatcaaagtgttctccttttcatgattctttgggcagctggacagagcagtatgtccactagaatacttgagtctggttttgtgatttcacaagtaacacttgctcttcagtgacctgagtgagggtcacccatgcccagttatgttcagggcctggctgattatatgtttgggatgtacgtaaatcagcactgtgcgcctgtcacccaggccagaatagtgtttgaagaagagtcatagctccaaaataacctgaaaactaaaaatatacatatataaaaataccttggatctaaacttaagagttttttttacaccgcatgttctcactcatagatgggaattgaacaatgagaacacatggacacaggaaggggaacatcacactctggggactgttgtggggtggggggaggggggatggatagcattaggagatatacctaatgctaaatgacgagttaatgggtgcagcacaccagcatggcacatgtatacatatgtaactaatctgcacrttgtgcacatgtaccctaaaacttaaagtataataataaaaaaaaagagtttttttttaacttaaaaatggttgaaatttaaaatgttgtaaagttgaaaaagagccccttagaaaggaatgattcagcattactgatggcattttaaaaaggaaatgtatctgtgagacagctttagaaaagttttgcagcttggataccgtaaactatgcactaatgagcttcaacccattttcttgcttattttgtcaaccctgacaccaaggatagttaccagctgctgaagaagcactttctggacattgggcagctttttcttttggagccaactctattctttttcagggttatagttaaatcattcaacacaaaaatatgtacttacacagttttagagcttgtcacattggtgacctgatgaatgccacttaaattacctagattcatctttaagcagaattgttttcccttcagatgcttagaaagattgttagtttcttttatatctttaagttstaaatcacaaaatcatatggcaagaaaaaccccagatttcttttccaatctatgaataaacataaagagacagttwatacttaattgatctatctgaactatgatttttaacttctctcattgtttttatttttttattttattttattttattttgagatggagtctcgcactttcacccagcctggagtgcggtggtgtgatctcggctcactgcaagctccacctcccgggttcacgccattctcctgcctcagcctccggagtagctgagactacacgcattcaccaccacaccyggctaatttttcgtatttttagtagagatgggctttcaccttgttagccaggatggtctcgatgtttttaaagaaaaaatatttacatttattatcaaattaatcttaaaatctaaaatacattaagatatgcttttggaaactgtttacaaacaacctcaacaaataaacatcatcgctttcaatcacatttctttttttctggacccagttgctctaacttgcactatcccttttttttttttttttttttttgagatggagtttcactcttgttgcccaggctggagtgcaatggtgtgatctcggctcaccgcaaattctgcctcttgggttcaagtgattcttctgcttcagcctcccgagtagctaggattacaggcatgcgccaccacacctggccagttttgtatttttagtagagatagcgtttcttcatgttggtgaggttggtcttgaactcccgacctcaggtgatccgcctgcctcagcctcccaaagtgctgggaytacaggcgtgagcccccacgcccagccccttctttttatttgaaatcaagatttcgtctctggcgaagttatttctcagatataacttagcaagaatttatcatcttttatcacattccccatgtttatgtgaacatgtatgacagcgatggtttgaagrtttcttcagaactttctgcttgcaaatattttgccctatcatccccttaaatatagttgtactcatggatattgctttccaaatttgaaaatacggtaattaattacttgcatgttgaaatatacataaaggacttgcccacacataagattccacctgtaattayggctttgaggagaggagggcatgaagggctgcatagtcttagtattaaataattcattacgctaaaggagaatgcacgtaaagtcaagtggcaggagatgcaattgtgaaagggccatggccacattttgtcttggggatgtggagccattgaaaataaatgaaacagtcactgtgtttaatctcaccagtcttcaaaacaattcagagggcttactgctcatttttactgataagaagataataaaaataataaagcattgacttaggtacaaggctccatttagaactaggttctttacaagcctcrcctctaattcatgcagcaatccttactcaaggtaggtgtttcttgcattatacagaagaggaaactgggtcttagagaggtttaggtctcttcccagggccacaaaactaaacgatgaaacttggaagaagcccacttttttttcactgcatcatactaccttgaatatgaaatatctctgccaagtctacaagtgcagtatagaaggttatggtgatggtcatagtgggtggattgaggctgtgtggtgggacagacagtggcagtagggatcgtgaggagggggcacgtctaagagctatttgggaggtagggtggaacaggcattggatgttactatatgtggaaagtgaggaagacagtggagctgagaatcttctcaggctggataggaggtggttctrtttacaaaggaaggtattatggggcagagcagttttagagggtgaaattgatgctcaagttacatgagtttctgttgtttttgacacagggtttctctctgtcacccaggctggagtgcagtggtgctgttacagctcaccgcaaccttaactaaccatcctggctcaagtgatcctcccatctcagcctcccaaggagctgggaatacagacccatgccaccatgcctggctaatttttttttgagactgagtctccctctgtttccccagctggagtgcagtggcatgatctcagcccactgcaacctttgcctcctgggttcaagtgattctcctgcctcagcctcccaagtaactgggactacaggagcataccaccatgcttgggtaatttttttttttttttttgagctggaatctcactctatcacccaggctggagtgyagtggtctgatctcagctcactgcaacctccacctcccaggttcaagcgattctcctgcctcagcctcctgaataggtgggactacaggtgcctgccaccatgcctgaataatttttttttttccaagacagaatctcgctctgtcgcctaggctggagtgcagtggcgcaatctcggcttactgcaacctctgcctcccgggttcaagtgattctcstgcgtcagccacctgtagatgggattataggcgcgcgccaccacgcctggctagtttttgtattttttttagtagagacagggtttcaccatgttggccagagtggtcttgatcttctgacctcgtgatccacccaccttggcctccgaaagtgctgggattataggcatgagccaccgcgcccagcctaatttttgtacttttagtagagagaagatttcaaacatgttgcccaggctggtctgaaattcctgagctmgagcgatctgcctgccttgccctcgtaaagtgtggagattacaggcatgagccattgtgcccagccacataagtccttttaattcatgttttctttgctggggaagcgtacattgcatgatggattcagatmctcaactttcttttttttctttttttgagatggggtctcattttgtcacctaggctggagtacagtggtgtgatcgtggcttactgcagccttgacctcctgggctcaagcaatcctcatgcctcagcccccaagtagctgggactacaggtgcacaccgccatgcctgactaatttttgtattttttttgtagacacasggttttgccatgtaagccaggttggtctakaactcttgagctaaggacagtccgcctgtkttggcctcccaaagtgctaggattacasgctaactttcaatttaataaaaaaaattaatttgtgcaattggttgttattttatagaagcctaatttctakaatatgggatataaacaatttaataatgtkttcaccagttagtttgattgctttctaaattaggaaaaatgaaaacaaataaacgatgggcaaaaaagctgactggggacagtaaggtctaagaaggcagcctaagtggaaaattagcccttactcaccatttagggttatgggggctgggagcaacagtcctcactgctcactgactaatctttatcaatcttatttaatctttattgaagatgcattagcatttttaatttaagtgggtttttttcctcttttcttttggtggggggtgtgggcggcgggggagtttcaatatgttgaccaggctggtcttgaactcctggcctcaagcgattctccckcctcagcctcccaaagtgctgggattacaggcatgagccattgcacccagccttttctatttttcatttcaagagtttgctttttaagaattaaaattgtgtaattatgacagtttttattrcagtactccaagctagagaaaagcatatataaattaatagttttcccttcttctcccacagttctgtctctgttgttaacactttgctgagtattcttctgtacttgttttaaatgtctttaaacatataggcagggtttttgtgtgtgtggtgtttttgktttttttttttttgctgtttttcttcctttgtttttataaaaacaggatcttgcagcctggtgttttaaatttagtagtatgtcctttcaaaaggcaggtatttacgagacaaagctgcatttttaaagcactggtgaagtgtgaagaaaatgagaccgattagggaagaaaacccgagaagctcaragtttgggtgaccctggggatgtgggaaggtggtgwaaatggtaccctgagggtagcatggatggtaagtgaaagaggaaaaggtgtaggtttgcataaaaraaactgatggaatttggatgcccmatagcaracccaggggaatgataccaggggaaaagatggacagttttgtgggtaaattagcagkgattttgattccttgtcttgttagctgctgatggagatacrtgtatcagcataatacctggctagtttccatggccggcaagagccagtcctgcagtgtgaccacatcctgtccattctgggtcttggtggcaagccaggatgattcaggcagttgggctttattacgttatcccttctttgccctctgaaagctgagttttgaaatagttaggatcttatacaacatctcagattcagcatgctgtgcasgaggtggggagaaaagggtacaaaagaggaaaatgttcagtgaaggtgttattacaatggaggggawtatgaaagtggaaattgataccttttcctcttgggatttaattaagtctataaaattraggtgttgcaatacataatgtctatgatttttttttaccasctctaaatctctgagatggctgtgttttagagctgcatgtkctgcttatttactgcctgtcctttacatttcaaattcattcaatatttttccaaagtacasaatagttttgcctagttgcagtaattttcacctagacttcagggatcttccatcaactcttttatgtattttttctcctttgtttttccactctggtcactcagttctagccaagatagtccaccttattttagcacttgtactatgtctctgtctctgtctgtctgtctgtctgtctstctctctctctctctctctctctctctatatatatatatatatatgtaattttgagatggagtctcactctgtcgctctgactgaagtacagtggtgcgattacagcccactgcagccttgacctcacaggttcaagtaatcctcccacctcagcctccagagtagctgggaccacaggtgcacaccactatgctggctattttttttttttaacctgattttgtttttactggaggctcaggtggcccaactaatttttagaaattattatttgcagagatgaggttttgttatgttgctcaggctggtcttgaacttctgggctcaagtgattctcccacctcagcctcccaaagtgttgggattgtaggtgtgaactactgtgcctggccttctacattttttttttamccatttcatagttccctttttctttgaacacttggtccaaactcacttttyttctggattcatattttctgatctcacmtattatgttatagaactgatatgttacgtttgttttcattgatgcgtstgtacttggcttcagagagcagaacaaggccctgtgagtcactgggagccagattttggatcaaaataaatcactttctgacaagtgtagttgtctagtaatggaatgaggcagtcttcttaggaagtaatgaattccctgtcaccaaaagggagaagctagtgagccacttgctgagaatactctatggggagttgtccttaggaaggggtatatctagaatgatctctaaggttcattcttattcggatttctttgatttttatcattccaggtgttccaaataatttgataagtttatgttttttatacttttcccaccaccagagcagtgtttccaacatggttaaattgttctgctttaatgtttggcatttcacactatttgatgactgtaaacatttggaatgttttcacagtgtctcaaaactttattttgatttatgttttgctttattttcagaagaaaactaatgggtaatataaagctttaagatgagtgtatctctaaatttggagagctttcagtgaaactgtacattttgaagctacgtggttgcattgagggaggtctacagcctccagaatcttctttttcacacacacgggcacatgtgcatgtgcatgactttatattttgtcatttacgcttagtcatatatatatatatatacacaaatatatayayacacacacacacacacacacmyatatatatatatatatatatttttttttttaagaccatatttygctctcgttgtccaggctggagtgcaatggcatgatctcagctcaccgcaacctccacctcccagtttcaagcaattctcctgcctcaggctcccgagtagctgggattacaggcatgcaccaccatgcccagctaattttgtattttyagtagagacagggtttctccatgttggtcaggctggtcgcgaactcctgacctcaggtgatctgctcgcctcggcctcccaaagtgctgggattacaggcgtgagccatcgcaccggcccgcttagtccaatattttattttattttattttattttatttattttttttgagatggagtctcactctgtcgcccaggctggagtgcagtggcgcgaactcggctcactgcaagctccgcttccctgggttcatgccattctcctgtctcagcctcccaagtagctgggactacaggtgcccgccactacgcctggccaatttttgtatttttagtacagatggggtttcaccgtgttagccaggatggtctcgatctcttgaccttgtgatccgcccgcctcggcctcccaaagtgctgggattacaggtgtgagccaccgagcctggcctagtccaatattttataatctgcatygtcaactagtcaggccccagaatctgtgggttcagcatccttggattctgcatccttggattgaaaatatttggaaaaaaaattgcatcggtactaaacgtatacaggctttttttggtcattgttccctgaataattcagcataacagctatttacatagcatttacatcgtattaggtattataagtaatctagagatgatttaatgtatactggaggatgtgtgtaggttacatgcaaatactacactattttatctcaragacttgagcatctgtggattttggtatctgcagggggtcctggaacccccacaccctcacccagactgagggatgactgtatttacgttatctaccactctgatgttttctttttgctttarattgcccattacctcttcatctgtttcatttattcattcaaaaatttgtattgagtggctactgtgtcgggcatggtgccacttgctggagatacagcgttgaacaagacagacccaatggggctgcctgggtggagcttatgtttcakactgggaagagagtcaacgaacatccacacatatttcagttgtgagaggtgccatgagggaagagacagactggctggggaaagcgtgatcaggcagtcttccccaggaggtgagacttgagcccagacctgaatgatgacaaggagccagtcatgtggagactggggaatgtgatttttaagaagaggacaagtgccaagatctgcgaactctgttgtagttgttaggggaagggatgggttaccatgctctgtaaaaatgaccattcatatttgaaatatgaccattctgtaacacagtgtattgcctactggatttttctaatgaggtattgggtctcaacattggaaatgtttgagcagaccttggatatctccctgaggtcttctctgagaagaggtgggtaggaactagtgactttcaatacagactgtatgttagaatcacctgggtgatttataaaactactgctgcctggaccccactccgggagagttaaatcactcattggaagtggagcctggcttcagcatgtgaatcccacttcccttagagatgcagccagggtaaagaacccctcttctatatttccaacttgaggactaaatgaccccatgggcgtagaagtgtttagtaagaaaatctagttccgggtgcagtggctcatgcctgtaatgccagcacttagggagaccaaggcagatggatcatatgaggccaggagtttgagaccagcctgaccaacgtggcgaaaccccatctctattaaaaatacagaattagctgggcatgctggcatgcgcctgtagtcccagctattcgggagactgaggcatgagaattgcttgaacccaggaggtggaggttgcagtgagctgagatcgtgacacttcactccagcttgggcgacagaacaagactctgtctcaaaacaaaacaaaacaaaacaaaaaactgggaagttatgagctaatacataaaccttcattgcacagtcttttaaaatttgttgtttctactttctgaaaatgaaaatattaaatccttcctgaaaacagaaaatatcaaaaacttaactgcattagacagagatatatgttaactttgagtgcatttaattttgtattcttgagtactgtttaaagtgtcttttaaaagttctctcttattgtgtctatttattttattctgtttgcagtttttatgccaactttacacatttgtaaatagaatatttaaaaagaattttttttgagggattgatctctaacttcttggtgacttatagttgttcttttggttgtacatctttactgttttccaacattttaaggagaaaaagcactactctcaaatgtaatatttaactgctgtgtttctatctttaaatatagaattgaaaatgagaacctgtttatatttatgggagcaatagcaatatgtgtacaataacagtagcaatttccttaagaatgttctgttgcagtttggcgtgggtctgtgatagaaggttcagaatgatgggtctttgtttttctcttgcatactgcagagtaatgtggaatcaaataccactattgaagagctcttagtcatcaatttttgaaactgaaagaggtttatattgtaagaaggatgggccctgttgataagcctcactgattgctacttgctagatggttttaggagatatcttgaagttgaccttgtgtgaggttactggatggaaacagcatgagtttaatyttgtacatgacttcttttgttgagctggagatactattgtyttgcagattatytytttggcacgcatgaccatttttttttgtyttttaaatcacaaactggctttytttctgctaaggttggtgtgcttagattctttaagctccaaatctcaagaaaatataggaaggaaaatcaaccattagagagagagagagagagaraaaaaaaaaaggaaaaaatataatgtgctccaaactgattataaatagcttttgaattgttggctccatagaattttttttttttttttttgagacggagtctcgccctattgcccaggctggagtgcagtggcgtgatctcagctcactgcagccaccgcctcctgggttcaagtgattctcctgcctcagcctcccgagtagctgggattacaggcgtgtgccaccatgcctggctaagtttttgtatctttagtagagacggggtttcacaatgttgtgcaggctcgtctcaaactgttggactcaagacatctacctgcctcagcctccaaaggtgctgggattacaggtgtgtaccactgtacccagcctcagtttgttaatattttacaataatttagaagtagaaccctttcttaaggctgggcgcgctggctcacacctgtaatcccagcactttgggaggccgaggtgggtggatcacgaggtcaggaratcgagaccatcctaacacagatcgagaccatcctaacacagatcgagaccatcctgactaacatggtgaaacccccgtctctatgaaaaatacaaaaaattagccgggcttggtggtgggcgcctgtagtcccagctactcaggaggctgaggcaggagaatggtgtgaacctgggaggcggagcttgcagtgagctgagatcgcgccactgcagtccagcctgggcgacagagcaagactccgtttcaaaaaaaaaaaaacaaataacaaaaaaagaagtagaaccctttcttaagagcattctcaggtcttctatcttaattactgtagttatttccagtcatgttttataatcaggtgctatttttcattgtggcataataagtaatatatttttgtaaatcatgttgaagtgcttgagacaatacaagcaattatttgctaaaatttagaccagggtctcaaaacaacaattacatttttagataatggtcacagtaagtcttttcaraaaaaagcaacgaagaaagctctagaccaatgagattttagtcatcattaatcaatgccaarcgaaaaaatcttaagatgtatttaaatttgtgatgccagtgtgattcagaaatttgaaaaatggatttcaaagtaatgctgtgagcagataggtcattgtataaacataactaatggttcattcattcattcctacaataatgattcagtgtcagatttgggtgttgaaaatacagcagagaacaaacacaacagaaggtccatatttgcggagcctacattttgtgggggaagagagatgataaacaaaatgaatgagttaagtagatagcacgttagatcatccaaaatgctatggggggraaaaaccctgggaatagggagatggcatgtgaagtggaagaaggttatgattttcaatagagtgatcagagaaagcctcattgagaagacacnctaaggaggccatgtggctggaggggactgagttagggggtgaatagtaggtgagaccagagggggccacatgatgtagcagcttctagattatcaggactttggcttttgctctgagtgagatgggaaactttcagagagctttgagcagaaaagtcacaatgttctgcactttttccttcattgagataacctctgcatacattcaagcacgactaagacccccttcagggaaaagaagttttcattaactcagtatcccatgaggtatatggcattctcttccttcccaccatagcaggtgtttaatagrtggttatggtattgcactgatttaggctgggaaaaaawtaaagatgaagttattaagacagccagttgtggtcgggcacagtggcgcacgccggtaatcccagcagtttgggaggctgaggcgggcggatcacctgaggtcaggagttcaagaccagcctggccaacatggtgaaaccccatctctattaaaaatacaaaaaataagccaggcgtggtggcaggtgcctgtaatcccagctacccgggggctgagccaggagaatmgcttgaacctgggagatggaggttgcagtgagccgagattgcgccactgcactccatcctgggcgacagagcaagactccgtctgaaaagaaaaaaaaaaaagacagccagttatttgaaaagaggttggagtagaccacttgttttaaaaataaccacttgtttgcctaggttaaacccatttactcaaaagacactgcgctgacttgcctggttccttgtacctgaatctttacctaagtgtcttgtgctctctgtcctttattctccataatgcgagctatccagtagaccctagccaaaggggacataaagacagtctcaacattgtattactggttctktgctacagttgtcattcaagttcctgagaaaatggaatgaatgtctgttattcatttatttattaaatctttagagagcatyatctatatgccaggtattatgcaggctatacaaaaattaggaagacgtgatctttatttttaagttacttatttgttgttgragrcaacagagataaatgaattgtgatattttactggaaacaatatgrgtttttgagttaagaacagactgtgtttgaaatccctttagcagctatgtgaccttaggccaatatttgaaatgatgtgaacgttggtttcctcctcagtaaaatggagaatgataataactataagtggtaaggaaaaatgcatgtgaaggatttaatacagtayctgacacatgacaagcacttgataaatgatggatgtgatggtgacaataatagtaataataataaaataataatrtgttggctgtgctcgataggagtggagggtagcaaactcagcttgaatcagagtaatctcctgatcaggcaacatttgagggggctttgaagaataagtagggattttccggggagagaagaggggcaaagtcattcaggargatgaaacagcctgtagargagggaaggctggagagagtgctgcttgtcagtgtctgtgttgttgcagtagggaggtagatggaatggggtgagaggggaggtgagcctggagagatggtttggggccagatggggaaagctgtgttayggggcttgtcagtttctgccagccaaggcttcagcatagctgactgtaacaaagttgggaaggccttgcttttgagagccagaccaggagtacctgtgactaacaaggggtctgggaggatctgctgctcccatgccctcctttgtrtrttttaaatctgtttgagccttctgggctcctgtgaattagggagwggcagctcctcagtctaactcctaytgtgaccaggttgcctaattggccctttggtttgggcacccactgtccttctgcgtggttggatagatgctgctcccaatgtccctgatctcttacagacccctctgattcttcactcttggctttgagagcccctgatgccctgcagtcttgactgagcttctaatggttgatcagacccttgaatgttgagctctttccatactagacttgaatattctcctgcccatttgatttgttaattaggattcattggctgtttctstgctctcctcttttctctctgttcctgctggttcaagtttaacctccattttctttctcctctgggaagtttcccttatgcctcttgaacagggtcaagagcacttaggagctcagatttacactgtatatcatgagaaaagcattgaaagtttcaaagcaggagagtgacataattagctttatgttttaaagcggmtttttgactttagattctggcaatacagtggtcctgtggtctaagacatctgactaaccttcctgmtagcaacaattaaaaatgctgagtgcaataaaaaactagcccttaaatggaatgaatgagtygactacttggtaaggatgctcagaggctaaaactgaatcaaagcaggaactcttaraagtaagcagtgtgttggctaggcgcagtggctcagcctgtaatcccaacactttgggaagccaaggcaggtggatcacttgagctcaggagtttgagacctgccggggcaacatggcaagaccccgtctctaaaaaaaaaaaaaatgccaaaattaggcagacatggtggcacacacttgtagtcccagctgctcgggagcctgaggtgggagaatcgcttgagcccaggaggtggagtttgcagttagctgagattgtgtcactgcactccagcctgggcaacagagcaagactccatctcaaaaaaaaaaaaaaaaaataagcagtgcatcaaatctgacttttgccttgaatgcatttgctgaatcagtattggttcaatactgagcattagttttccggccacttagagtagaggaaataggagataaagcctagaatctccccagatttgggctccagaggaccctacaactattgtggggggaactggatgtggtgggaaaaattgtatacctcttctcagacttcataccccaccaatgggctstcaccacggtttgcagactgttcacaccgagtktgtgtagaaaggatgaaatcttaagattagaatgagagtgaacgcaggttggtcatgcctgcagctctctttgaagacactcgctatcatggygggctagaaatagtcaccatagatagtattcttaaaaaaaaaaaagttgctggccgggtatggtggctcacacctgtaatcttagcattttgggaggccgaggygggtggatcacttgataccaggagttcgagatcagcctggccaacatagtgaaaccttgtttctactaaaaatacaaaaattagtttggcatggtgatgcaagcctgtaatcccagctacttgggaggctgaggcaggagaattgcttgaacccgggaggtgaaggttgcagtgagccgagatcagatcacgccactgcactcyagcctgggcgacagagtgagactctgtttaaaaaaaaagaaaaagaccctgcagaaattaaaattgtaaaaatataaatatacaaggaacaggcaccaggcacctttggctccacatcctygtcatcacttcataccttgtggctctagtttgcatttttgtggctgcttatgaggtcgtgcctcttcagtatttacaggcatttatgactatcctgcactgaaatgcatttcatgtctttgctcatttaccattggattgtttacatttttcttcctgatttgtaagagtatacacctatactcatattctgtatactaagcctttttagttatttagatatgttggaaatatcttttcctagtccatgggttgtctttttactctttctgtggtatcctttgaagaagagaagtttataattttaatttagttgatttatcactsttttgtgtttctaggttgtatttttctattcttaagaaatcctttccatgaagtcataaaaacatgcacctatattgtcttctgaatatcttmtggtttgacttttatatttaaatctttaattctccctggaattgakttttgtgtttggtgtgaggtagaaatctaatttaaattttttcccatgattccaccccaccccccaataaaattagccagtgatctcartaccacaggttactgaacagttgatctttcctgcactaatttccaatgtstgttttgtgataaatcaagtttttatatatgcatgggtctatttttggactattctgttacattggtttgttggtctattcttgtgcaaatgccacactgtcttactcttaccattttaatataagttcttggtagctgatggaataattcttcttattttgttcttccccaggagtcactggctttggacaccttccttgctgtcataggctctttgctttggaaagctctcaacatttacaaggaagtgacaagtgtgaacgaaggcagatcacactgtttatttccgtttccccaataagcattaaggaggaggatattgagggtctagttgtggttgtcttagactttgcacatgtttttataagcaaagcagacaagctccagcaagggaactcaattgtctaattagatgttacyagaaatcttattggggctgtgatctaattcttttttttttttttgagacagactcttgctstgtcatccaggctgcagtgcagtggcgcgatctcagttcactgcagcctytgcctccgaggctccagtgattctcctgcctcagcctcctaggtagcggggattacaggtgcatgccaccacacccggctaatttttgtatttttagtagagacrgggtttcaccgtgttggccaggctggtctcaaactcctgacctcaggtgatctgcccgcctccgcctcccaaagtgttgggatcacaggcgtgagccaccgcacccggcctgagctaattcttaagaagtcactttggaaaaaaatattatttaagggcttttcataaagtattcaraaaggtacaagttctaatctaacagttctatttgtgatttttgaggaagcatatgcgtatttccacttaagcatctgaaatattgcctmtagtgctgaacaaattcttcccttggttattttcctcttatctcagtccctggarraataaatgcctgtactaattctctatatacataaatggtctctttaggtataaataacctcataatcacataaaagttaaagttttaatggaaaaggctgagatgaaatattacctaagtaggaattaattgctttttatcactttacattatttcatttttagtattatgaaaaatataattgttccttttcttaaaaaaaaccagygtaatttgtgcttagttttaaaccaaaatttttcctatatgtttatagtttatattttcaagccaaaatacttgagtttttttcctgtcataatatatcaatatgagaaatgtattgttactttagaatcttttaaaacttctttttattcctttttttgttttttaagatagggtattgttttgttgcgcaggctagaatgcaagggcacgatcttggcttactgtagcctcagcctcccaggttcaagcaaccctcccacatcagccatacaagtagccgggactacaggcatgcaccaccatgtccaactaattttttttttctttttttttgagacagaatctcgctctgttgcccaggctggagtgcagtggcacgatcttggctcactgcaacctctgcctcccagattcaagagattctcctgcctcagcctcccgagtagctgggattatgcaccattgtgcctggctaatttttgtatttttatagagatggggtttcaccatgttgtccaggctggtctcgaactcctgacctcaggtgatctgcccgcctcggcctcccaaagtgctgggattacaggtgtgagtcaccacgccaggctgctccgtgacatttaaataaaatcatattttaaagtccagttgtaagcctatacatcccccttatcacttatctctaattcacttctagacctggtttgaactttggatttagtgctttcaaagtgtgatttttttaaaaaaattatttttctgttgccgtatatttcagctcttctcggtcttgaannnnnnnnnnnnnnnnnnnntcgagtagtcatcactcagctccccaaagtgctgggggttagaggccaactaattttttaaaaattttttgtaggccgggcatggtggcttatgcctgtaatcccagcactttgtggagtccaggcagacggatcacctgaggtcaggagttggagaccagcctggccaacatagtgaaatcctgtctctactaaaaataaaaaaaattagccaggtatggtggcacatgcctatagtcccagctacttgtggaggctgtggcaggacaattgcttgaacccaggaggtggaggttgcagtgagctgagatggcgcaactatactccagcctgggcgacagagcgagaytccatctcaaaaaaaaaaaaaaaaaaaaaaattctgtaaacacaaggtgtcactatgtttcccaggctggtctcaaactctgggctcaaccgatcttcccacctcagcctcccacagtcctgggattatagacatgagccaccgcacctggcctaaaactctttcttcaacattaagaaataagacttttccagtctctttcttaaccctgtacccttttctttctcatcttcttttatcccctcccttcattaactttacattgcaataccaaggacttaatggtttgttaaaaaaatgaattctactcagtagaaaattcctgagaatatttattaaatgtcactgggaggaaatttccctaagcaagatacaaaacttagaatcaaaagggaggactgacttatttggttttagaaatgaaaaagaacagtttggaagaaatagtgcgatgtggatgacttacaaacaattattattcctaaaatataggtacratgagtttattgaaaacaacataatgcaataggaaaaaaggacaaagascaactagtcagagaggatttgcaagtaaatcagtaaatgggaagagatgttcaatctgagtagtcagtgaatgtaaattaaggaagtttactttttttcccattaatttacaaaaattttaaatatgataatatacagtgacaaaatttttttttttttttgagatggagtctcgctctgtcgcccaggctggagtgcactgggcaatctcggctcactgcaagctccgcctctcgggttcatgcccttctcctgcctcagcctcccaagtagctgggactacaggcgcctgccaccgcgctcggctaactttttgtgtttttagtagagacggggtttcaccgtggtctcgatctcctgacctcgtgatctgcctgcctcagcctcccaaagtgctgggattacaggcgtgagccaccacgcccggccccaaaatttttaaataatgataatatacagtgtcggaaagtgtgtagaggtagaagtgtgaattgctgtgaactttgagaacgtggattggcagtctgtattaagatctaaaatgcatacagtgcttgggcccagcagtctcacagaagccataggtgattgtatgtcagttcccaaataccactcgttagagagaagcactgtttaacatctagtatctcatttagaccctgtttgagcatagatcatatgtgtgtggaacataaaagtaatcgaagtatgctcattctttttttaacatatctttccaggcttctatatagttaaataaataatgctccttgacatttatgtatttatttatttagatggagtctatttctgtcgcccaggttggagttcagtggtgtgatctcagctcactgcaacctctgcctttcgggttcaagcaattctcctgccttagcctctcaagctgggactataggcatgcaccaccattcccggctaatttttgtatttttagtagagacggggtttcgtcatgttggccaggctggtctcgaactcctgacctcaggtgatctgcccgcctcrgcctcccaaagtgctgggattacaggtgtgagtcaccacgccaggctgctccgtgacatttaaataaaatcatattttaaagtccagttgtaagcctatacatcccccttatcacttatctctaattcacttctagacctggtttgaactttggatttagtgctttcaaagtgtgatttttttaaaaaaattatttttctgttgccgtatatttcagctcttctcggtcttgaaaagatttgtgagcctttttgacaaaaggtggtgctcattttctatttcggtggctccagtaaagggagctgctctctcatcggatgattattgcccccagaagtggtcctaccatagctttactggtcagttagccagaatttacacatttactctgaggcttacaaaaatactgtgttcataaaaagccctccttcacattttgtgaaacagttgcatggtgatttgggatattttaagtttaccatcacctctctgtcctctgcaaaaataaaaattgtggaatgtaaaacaactctgttgcacaaaaaggggaacttggtgtaggaaaaaataactagaaatgataactacgagacactgcactcccaaattgaagatttaaaaaaattcctgatcgtaaataagaaaaattatggagacatttatccactgcatatctgatgactaaacgcttggtataccccagccattgttaggtgccagggtacaaagttcctgccctcagcgggttgacacacttgtgggggagaaaggcaacaaaagcttaagcaagtaaatgcataattttacagggtgatatgtgctaaaaastaaataaagcaaggtggaggaataacaagactggcgggggtgctggctggggtggctatttgagaaatgagggccaggcatggcctttcagaggagatgatgttggagctgaatcccaagtggtcagaaggagcaaggtgggaaaatatttgagcaagatgggaaaatatttcagttcctgggtcaaaagtaacagtaagtgtaaagatcttgagatgggggctgggcactgtggctcacacctgtaatcccagctgtttgggaggccaaggtgggcagatcatgaggtcaggagttcgagaccagcttgaccaatatggtgaaaacctgtctctactaaaaatacaaaaattagctgggtgtggtggcaggcgcttgtaatcccagctactcaggaggctgaggcaggagaattgcttgaacccgggaggcggaggttgcagtgaaccgagatygtgccactgcactgcagcctaggcgacagagcgagactctgtctcaaaaaaaaaaaaaaaaagatcttgaratgagaatgaactgggtttttgtgaaaatggcaaatggcattttgggtactgcaagcctttgcggctcggaactgtgctgtgcactgtgggactgtgtggctcaatgcgggacggttagcatccctagtcactgtcattacaaaaacagtcacacattctagacacccactgcccgccccaacgccaagggggcagtactgccttcaaccaggaccccaaaagactccagtgtggcagttgttggggagggggaatgtgagaggggcagtggagagggagtcagcaagcaggttctctgagccctggtgagaagtctggattttattttaagccgcctgagtgatgtgatttcayacatgtttttaaaagatcactstggttaytccttgcasacagtgraagagtgagccaagttaggaggctattgcagtagttcaggtaagagatgatggtggcttagactgagagagaatctacttgagggtaagaagtgatctgattcagggtatatgttgaaagatttgctaattaattaaatatgggaggcaaaagaaggtggagaaatcaggatggctcctaggtttcttataaggagctaggaagaatgtaaagaaatcatatgataaggagatataaaaaggaataaaataatatttcacacttaaatttaggagacgaaatatttgcttatttgaatttgaaaattcttgtggataccaatattgatactttgtctgaaaaataattttaagatgagtctcctggccaggcggggtggctcatgcctgtaatcccagcactttgggaggctgagtcaggtggatcacctgaggtcaggagtttgagaccagcctgaccaacatggtgaaaccccatctctactaaaaatgcaaaaattagmcgggtatggtggtgcacacctgtaatcctagctactcgggaggttgaggcacaagaatcacttgaacctgggaggtagaggttgcagtgagccaagatcgtgccactgcaagccagcctgggcgacagaacaagactccatctgggaaaaaaaaaaaagatgagtctgccaaaatgtttctcatttggaagggattcatgactttgccagaaaaacaagcagcattctatagttataatgctctatgatgtaatttactggacctaagttggctacctttcatgatgcatattaagtgtggagccatatttcttagtttctgttataaagctaaactgttaagtcatttttattcctataaagtcaaacaaactagccatggatactttttaacattctgtgaaaccaactttatccagtttctgaaatggatgccagttctttttttttttttttgagatggagtcttgctctgtcccccaggctggagtgcagtggtacgatctctgatcactgcaacctccgcctcccgggttcacgccattcttctgcctcagcctcttgagtagctgggactacaggcgcctgccaccacgcctggctaattttttgtatttttagtagagacggggtttcactgtgttggccaggatggtcttgatctcctgacctggtgatccacccacctcggcctcccaaagtgctgggattacaggcctgagccactgtgcctggctggatgccagtactttttaaaccaaagttaaaataattatttataggaagcagttgtgcactgtagattaggaacatggagactggggcataaatatattcttgagctagaattaaagtaaaacatgtgactgatggaaataacagctctccctgtgccctaccatggaacttggtaagcctttgttaactcactggcactgctagatcatgctatggtccccgagggccagggaggcaagtgtgytagtccaagtaaaaagctgatatgatctttgtatgaacagaaacactgtttgtaatgtgatgataacgttggtttcttgctcctgggatattgtgttctaggtaaagtggtccagagaccaatgggtggcagatacagggatacagaggtcaacttaatataaaaaaagaccttctctaatgtctaagagcagagtgaaagtgagcaggccatctgaggagagagagacttccctgttggctcatcatgatgcttaagcagagccaaaaagctacttggtagggatgtcaaggaagtgagtcaggtgttttcagcaccgcgactctgtcattgtgtgcctctctccttaatacctcagaattagaataaagtcttgataacagtagtggcaccagtcctgtggtttgttttgcgatgactgtgtggttgttaaactttctaagtgaaacaccatagtgtcgggagcaatgccgacaagcctggccacctttggtctacagcagatattgcaagctgrtatcccgtggccacagtcaggcttggtgattgataaacattttgatttagggagctgcttttttcaagaaacagaatcacataaacaggatttcaggccagtctcaaaaaactggaagatttcacagagccttgggyccacatttctgtgtggcatcagagggctagaggtgaatgagtcctcctctcctctcctctccccctcctcccctccattcccctcccctccccttcccckctcccctcctttattttttttttttatgagacggagtctcactgtgtcacccaggctggagtgcagtggtgtggtctcagttcattgcaacctccatctcccaggttyaagccattctcctgcctcagcctcctgagtagctgggattacaggtgcatgccaccatgcctggctaattttatatttttagtagagatgggctttcaccatgttggccaggctggtcttgaacttgtgacctcaggtgatccgcctgcctcggcctcccaaagtgccgggattacaggcatgagccaccatgcgtggcttttttttttttttttttttttttttttttgagacagggtctcttgcgctgtcacctaggctggagtgcagtgagacraacacagctcactgcagcctagacctgstgggtttaagkgatccttacatctcagcctcstgagtacctgggactacaggtgkgcatcaccacacctggctaatttttaaatttattgtagagacaacacttcactatattggctggcstggtctcaaattccttgcctcaagcgatcttctgcctttacatcccaaagkgctggaattacaggcatgaaccttcacctttcttttagaaagagcgtgaatctctaattcaccagagtccccaccattccatctcatctgagttatctcactatctctgtkcttccctcatttacatcatctgtcacttacctgttgacatgtgagttttgactyttgattgagatgctgacaccctccttcccttctaggaaaggaaaataaagggggaaggaaggtggagagggacaaaggagaggcgtgtggaggatgatagygcaggacttgcattctcagttctgcctcttaaatcttggaacctatttcttcatctaacagtataggactgatgtttatttttgtattagatcatatatataggagtacctggcatataactttgtccaaagtacacattctttagctggtgctcctctgtgttcccctgtaaagactgaggcaactataatgttccactgttctgtgattattgattttcaggtctgtttcctccaccagattatgtgtgtcttactcaactttgtatcaccaagcacctacgtggcattttttcttttttgaaggtagggaccatggctttctctttctttactggacactgtatagatgtcatgcaggtctgaacgtcacactgttaaataattacttaacaactgaccagaactaaggctstggtctagagctccaaaccagaagcaaaaaggaatggtgctgggctggggcactttcctctaacatcacccaaacccagaaaangaggatcgtaagccccttcatgggccaaatgcagggctggggcccttgggctaaccctttagtgcctctggctgcatcactgtcagagtaaggtaaccagcaaggggctgcagggaacaaccagccaggtccagacatggacaaacataattggaaggaagacaggaaatggacaggtcctgtccagtgtagataaaatgacagcagctaaggcaggttgaggggcagaggagaggctgggggatcggtattgtagcaatgcaggagtcctgtcctgagtggctgctcagggtattgacatgccattttgataaatacatgaattaatgagtgagtttcgagagtagggggagagagaataactgggcatccccttctgtagatcctcagtcttctagtctyatctctctagaaggatattcacccatactcaccttgtccactttgtgccagagttgaacattcttaagaaattaagaaggtgattctttgccarccatattccagttctttatttaggagctatattatcagctttgcttatggctccagaagtggccattaatacctggagctaaaacactgttttggtttagcatgactctagttttcactgaatatttagtatttttaagttargtttttttgttgttgttgtttttgtttttgttttgtttgagacagtgtctcgctctgttgcccagactggattgcagtggtgtgatttcggctcactgcagcctacactgcctgggttcaagaaattcttgtgccccagccacctgagtagctgggattacaggcatgcgccaccacacctggttgatttttgtatttttagtagagacagggttttgccgtgtttgccaggctggtcttgaactcctggcctcaagtgatcagcctgcctcggcctttcaaagtgctgggattacaggcatgagccaccgcacctggcctaaggttaattgtttttataagcaaattattttgcttttgtgacccaaagcagtactctcagatacttagtgtagcaatttattactcagatatataactttttacaaagagaatcatagcagaaaagaacaaggtaacgtgttgtagggcatatgttctgaaggagcacttgaccttatcttctgacatcatgtaaagattttggcatttagtgtcatcatgtgcaaccattgttactttttgctactgtatcataataatacttagtcgtatcagtttgattaaatgcctcctttgtatggttcccagcagcatggctgtagaaagtattctcaaatttatcaggagacccaagttttaattcggattccctttgtaaaaaggcctccattactggaggccaaatataaaaacttttttttttttgagacagagtctccttctgtctcctaggctggagtgcagtggcgcgatctcagttcactgcaacctccgcctcccaggttcaagcgattctcctgcctcagtctcccaagtagctgggattacaggcacgcatcaccatgcctggttaatttttggtgtttttagtagggacagggttttgctatgttggccaagctggtctcggactcctgagcttaggcaatccgcctgccttggcctcccaaagtgctgagattacaggcgtgagccaccgtgcctggccaaatatataaagtttaaaaatagctcgcttgtgttcattgcctaccacatactgggtattgtgctagatatttaatatgccagatagcatatgcctcattagcctatgaagtagaggcttttattattatttccacttacatagatgagaaaattgcagcacagataaattaatttgtctagcgatggaaccaaaatctcagtcaggcagtgtgacttcaaagcttgtattgatagaagttctccaagtgctttaaatatattaactcattcagactcaccaagctgtgcatttttagtttatagagttgatatcagtattaaataggaatatgtatgtgtatgtatttatatatgtatgcagatggtccctgacttaacgatggttcatcttaatgattttttgactttataattattttttgactttataattttttgactttatataaaccatattttgggtgcccacacgtctattctgtttttcactttcagtacaccagtcaacaaattacatgagctattcaacactttactttaaataggctttgtgttaggtgatttttgcccaaatataggctaatgtaagtgttttgagcatgtttaaggtaggtgaggctaagtaagctgtatttgataggttaggcgtattaaatgtatttttgacttatgatatttttcaaactatgatgggtttactaggacataatctcatcatcagttgaggagcatctgtatatgtrtgtgtttagatagatataattagatatctatatataatagattctatgctatgggcattgtaagttctaaattgcttcagtggcattattgtacattcttayataagattgaagaattttgtgattttgattaatttatatccttcaaagtgaccaggaaggtagagtttgcatgcagaaaatttgcatgtatattaattccataaataatgtttgtagttaaattttcattttgtttaaacattttttacaagatagagtttactcagtgctgttatttagcagctgtgtgtatgacttcataatttagggggctgtctgttttgtgttctaagccacgtggctgctgtggtgactgctttaraaactttcagttccctttgctgtgaaacaggtttcagtgcatcgtccctgtgtataaggtcaggtttcttacatggactcactctgtttctgtaaatttgtctgagaattttcaaggcagtgctttcatggcctctcctctaattttgtgtgtgtgtgtttgtgtgtgtctgtgtgtgatgatgaaaaagtcaaaagccctaaaattaaatcagagtttaatccatgtccctaaactagataagctgctttagaccttttccttatcccttacacgtcgctcagtaaatacttgctgattgactttcaaattcagattacttttacgmtagcatacggtgggcacaaagggtttttttgtttatttgtktgtttgagacggagtctcgctctgtygccaggctggagcgcagtggtgcaatctcggctcactgcaacctcctcttcctgggttcgagcgattcctcgtgccttagcctcccaagtagctgggactacagacaagcgccaccacgcccagctgatttttgtatttttagtaaaracggggtttcaccatgttggccaggatgctcaaacccctgacctcgcgatccgcccgcctcggcctcccaaagcgmtgagattacmggcgtgagccaccgckcctggcctgggcacagagttaaaaaaaaaatactggtaacagaaaacttgttggcgtgtttcagttttcagagtcttctataaggtcttataccagccgagaagcagcagaaccatctgtccgtgtaccgaggacggatctcarcagctctctgttcagtggctcctgcctttgtagtggattcccttgctgtgctgtaattaagtcagccggcaggagttcctgttttgagggggcctctcccggctggagaagtaccactgcctttgtgttacctgccatgttattgtggagtggataatttttttttcctgcatgggtcttggtttaacagcaggatcctctgggcttcttccaagaagcaccacatttccctgaaaataaatggcagatgaattatttcttgagattatgaaaatctgttagatgaaagcttgcctttttstcatgttcaaaacaatgctaaatgcttataattatactcccaatgaattacttctttcactggcttcctttgctctggcaaaggtggattttttttccatggcagagaaattttataaaaaatgtaatattttagaaawtgcctaaatgtcaagaatacaacatcttgtttgttgttgttgttgttgttttgtttgttttttgatacggagtctcgctctgtcgcccaggctggagtgcagtggcgcaatctcagctcaatgcaaccccgcctcccgggttcaagcaattcgctgcctcagcctcccgagtagcctccattgaaggaagtgccatagtgtgggaggatctttttattttctacgcgcaccgtatttgattctgtgtttacaggaactgtgtctgtagacaaaaagcaaaatgttgggktttagtttcttcaggtgaataaaatgttacttgcatctcctcattgtcacagtgttcgtattacatacttcgtgtgtgtagttttggcatttaaggaaacagagctaaaaaaaaaacaaaggacaataactgcatcaacaacatgttatacaccagaggaaatgcggcgacttaggttctgtgatgggaaacccggatttttttgttgtacttgaaatcttccgtagaacgtacgtgtttgcatgacccagaaaggaaaacacattggaggactttgtactagttccattctaattctgtaaaattctcacaaattcaggcatctgttaacccttcgagggcatataagttcagagccatgttttctgttttgtgtctttccctttggcggagtggttaccttttctgagcccttggcttgctttctgtgaacataaggcgctccatctgccgctttaaagtgaagatttataattcaaacaagacagcgtttcgatgttgcactcctgtcttattagatatcaacttaaagttaagaaaatggaattattcaaggccttgttatctagtttatagcttattcagaatttatatttctgatttttttttgtcctgatgactgcctgtgactaatttgtgtttttgttattaagctaagattgtatgaaaaatatggcaaaaacaaaattctatatttctaatgccccatgagaaatctgatttagaggcccttcctttggacacactttttgttttgttttgtttttgagcggagtcttgctctgtcgcccaggctggagtgcagtggtgcaatctcggctcactgcaccctccacctcctgggttcaagcgattctcctgcctcagcctcccgagtagctcggagtacaggcgcccgccactacgcccagctaatttttctatttttagtagaggtggggtttcaccatgttggccaggctggtctcaaacccctaacctyaaatgatccatccgcctcagcctcccaaagtgctgggattacaggcgtgagccaccgcgcctggcctggacacccattttgaatagcacttaccacagattcccgaagccagtggttttctagcctttttattcgccgttcgttgtaagcttcttgagtcttggtgattcttgtttcatttgtttttgtttctccccagagcctagcacatagtaggtgacgaacaaatgttcatcgaatgtatgggctcaaccatagtctatttttttcaaaaaggtataaatcttatcaatgttttacattttgctgaacaaaacaggagagagcggattcttttcaaataggaaaaattagggagggaaaagagggattgwctgaaactctattgaagtatgtcaacataaaagtttattgacagcctggcgtgatggctcaggcctgtaatcccagcactttaggaggccaaggtgggcgggtcactagaggtcaggagttcgagaccagcctggccaacatggtgaaaccccgtctctattaaaaatacaaaaattagccrggtgtggtggcaggcgcctgtactctgagctactggggaggctgagacaggagaatcgcttgaacctgggaggcagaggttgcagtgagctgagatcgtgtcaccacacttccagcctgggcaaaagagtgagactctgtctaaaaaaaaaaaaaaaaaaaaaaaaamaacaaaaccacccctatctatcctatctatcctatctatctatctatctatctatctatctatctattggtctatctatctagataaaaatagcagtcaactaatttttcaaattaaaaatgctttattgttatttatagcatgattgtttttctataaaaaaggcatattacaacagccttcgcttcacatmtgactcttgcagcattcttataaagagatctcacaccatatttgagggcttcattagttttctaagccttaaaaawatttcatcattaagattattctctcatgaagcacccaaaatatagacagcttttcttattttcttttcttcaattgttgacagtctaatgctgccagatctttatytgtcagggacttttgatgttgttggagccatctcttgtggactttatgaaaycttgcatgcagcacaatttgaaacttcattgtgcattcaatttgcattgcctttgctgtgttcacagtggcactccatgaggcttaactatggagatcctggtgctacaagccgttaaatagttctctcttcycaacctattcccctatcctgcttttcttttcttcatagcacttattacctyctgattatattttttgtttgccttttgtctatcacctgtcattcttttaccagaccatctagtctyatatgtctatataacctttctgaaaaacatcctgtgggaaatataccatatatacagaaaaagtgcacaaacatgaatatacagtttaacaaataatataaacctgytattcatgtagccaccacccagatgaaggaaatagaatatcataagcaccgcasaatctccatttgtgcccttctccatcgtagctttctctgtcccagacaaccattgtccacaacttgttgtaataatttacttaattttcttttatagttttatcacacataatttagtttttgtctgctttttgaactttacatgaatggaataatattgcatatattatttaatgctttttctttcatttaacatttttktktgtgtgtgtgtgagattctccaggttgttgtacacagtgctagttatttcattttgttatggtatagtatcccattgtatgattgtaccacagtttatccattttttagttgatgggttttgacttgctttcattgtttgggctattatgaatagtgctgctctgyacctgttgtacatatagcctggtgaacatgtttgcgaatttctatgagcgtgatcacrgtggtgtagaattgccaatcttcaacctgcctgtattttccaaagcgatcataccaatttatttaccttccagcagtktatgagaattctstattctcaccatcattggatattgtcagattttaacatttggctcaactgatgggtgtataatggtatcctatggtacttataatttgcattatccctagttactaataagcttgagcaatttttcatatttttatttcgatttcctaatttatgaaatgcctgtttaagtcttcagccatttcaaatgttacctgtcttttcaaaatgatctataggagttctttgtataatatatattctggcccctagtcctttattctttgtatgtgttgcaaatatcttcatctctgcagtttactctttttgtggtgtcctttgataaaattctcaatttggtgaatgtaattgaatttattaatttttctctttgttatgtatttttgtgtctttaagaaatttttccctatgtagggaagaaggacaaaaattgtctttcataattagttctttaacccttcataactttgagtatataaattattgtgaccatctttgaatctacagtagttgaattgcatatatagaggcttgagttcttaaattattctttccagggtgaatattagcatatcacaataggacagtagggacagtggctttttcgctaatgaaatctaagatttttccttttctgctcatgaaaaatgtttctgcttaaattgtaatgagtgtacaagaggcataaatccacagtgggtacaaatgtcaaagattatggtttaaaccagcaaaatatgtcttcttagatatacgaaacattttgtcaaatagcccctggcatcatctgggctaaatgaagaatcaccaggacrtgtgatacagtgaaactattccacttatagtaacagcacttagtaattgctttcattaatccaggcaggttaatattctatctacttgcataacaatgtcaaaaaatctattatctactgaaaccttttatatagcaagttaagctcctatttctttcataaagattgagattcaaatattaatccaaactactcagaatcactttctcttcctcacttttctgatacccccactggagagtgactgatcagtgcattatctgtcacctcagagctcagagtgcccctcttttctattcaaatacaaagccattcatttmctttgatggacaaatagccgtggcattagtatgggtaggggcaagtgctgttgtctcttatctaggaaggagttggttcttttctgatggttgaataatatacttaggtatagaaagagacctgagtgtcttgaaagcaacattctttcatttttgtcaatgttttaatcagcacccctgtgcatatattatctttgcatatttcagcactttgtattagacttctacatgttgtggtctttgcttctgataagggacagaataaataggaagaaagaataaaaaagccataatgttaagtacatccattccatgcccatagccatacatcacagaagtcacagggaaggctctgtgacacragataatkatgtggatgtgacagaacatggtagaggaaaaggccacagacaggtgcagagtaggaagaatgaaagaattcattgtggctgtcaaaatcctatgtttgtgttcccaaatcctatttcttttttcttttgacttgtgatgtattgactgtcaattagttatcaggtactatgttcagcccagttattgcacaagagatcctgaaaatctttaagtagctcctggacttggaagagggaaggaaggaggagacactaaaataattacaatatgttactattatacatgacaatatgcagaatgcatttggaacatagccaataactttacacagagatagcagtttttgagctgaattttagaggaccaagttgatagaatttgatgatcagatgaggggttagggagaggaagtctttcagtttattttaaggctggagtgaatattatttttgtaaatgcaggattttaaggaaaaggacaaaatgccagaagacagcagatttctattttctgtatatttgtacatcatgacaatacatttatagatacactaattcttgtacataaataattcatataatgtttgtctttatcagtctgaattgtcagctttggtcatagggaattggaaccaagtgtttactgagcatctactatatgtgaggcactatattaggtgctgggcatgcagtgatgagcaaaacagggatgggtccagctcttatagaacttagagttgagtgggaaaaacagaattaatcaaatttccatatttataattagaaatgacatatacatatgaacaaaggctctctcagaacccaattattcttccctttcactcttcttcctaatcatactaccagcgttaagttgacagttatttatcaggcatatttagcagccagccttacagttttctcttgcacactgttaacaattactgtcrcatggtcactgttacatgttagccaatagtgcctcacattcactgtggcttccaaagcttgggcttggggaagcaggtggatggygatatcatgagctcagatagagatcatgggagaagagatttgagatgttttaaaaaagtgttttgagcagatgaagttaaagagttaaagggaactatggtcaagtggaggtgctggtaggcaggtggaaatatacttctgaatctcaggatgactaatgaaaagcaagaaaatgaacaacaagggactattaatgtgtgttatgctgtgcttatgcattttgtctggtttcaaatcattgtatttaagtagttcttaaagtcacaggagtgaatgagattaagtagaggaagaaggaaaagaggtacagatggagacctagggagtgccaggcctcagagcagacagaggaagggcacgcagtgacagagcccacgaagtgtggccagagagcagtgatgaggaggattacmgagtggctcatggaaaccagcgtggaagctttcttatttcttcttctccttctgcttctctttctcccttcctcctttcctccctccctccctccctccctcccttccttccttccttctcctcctccttctccttcctcttcttcttcctcctcctcctcttcttcttctttctcttcttcttccttcttcctccttcctcctccttcttcttcctttttcttttttgagacagtcttgctctgtcacccaggctggaatgtagtggtatgatcatagctcactgyagcctcgacctccccaggcttaggtgatcctctcaccttagcctcccgaggagctaagaccataggtgtgagccaccatgcccagctaatgttttaatttttgtagacatgggacctccctatgttgcccaggctaatcttgaactcaagtgatcctcctgcctcagcttcccaaagtgctgggattacatatatgagccactgtgcccggctgtgggaagctttcaagaacaagagagaccaatgttgccagacaggccaagtaatattaggactggaaagcagctagattgagagactcacaggaacaagaacagagaattctgaattctaaaatccacaacgctcatttcactgaaaggtcgttcaggtggcggtggtggatttttttcccttagcygtcattttggatatttgattaattatcgaccattatatttccttcttcttgttagttacgatttactaagaagaatttttatgctattttaaagttaaatgatctgtgattgtaaaatcattcattatttacctcaactgctcacttaattttttaaaaacatcttcaaggctccttcagagtttttatgttgataattttaaaaaatctttttcaagttttctagaaacatgaataagtacacaataatttagttaatgtgggcagtaaatacacagttgtgatagtgaaatgtcttctatgaactagaaaataagaaaatagacacttaaagttcagagtagagaaggaaactcaaagagacakaatggttccagggcagsctaactgtacagtacccttaagaaaagtattcgtatctatatctctactgcagtaggccaagtgctgtggcacaygcctaaaattgtagcactttgggaggctgaagtgggaggactgcttgagcctaggtgtttgaggccagccctagcaatatagggagaccccccatctctacaaaaaataagaaaaattagtcaaatgtggtggtgcacacctgtggtcccagctgcttgggaggctgaggtgggaggatcacttgagtctgggaggttgaggctacagtgagccgtgatgacaccatcacactctagcctgggtgacagagcgagactccgtctccaaaaaaaaaaaaaaaaaaaaaaaagaatctgagaagcagatactggccatattcactgaggtgctaagcaggggtgggcaccctgcctggctctgtagtggtcatttctgacaggcctgtgttgtggagacagacacactaggttttcagagtctgatgcagttacattcgaattaggcaaatctcatactgattctgattccatgttccccgcaacaggcacccggtaaactggctttctggagagtctgcctttgagcagagaatgtgattttcccactgtccttctctgacctctcggcagttatacaattcttattgtaaaataaagctctattctggttttgtgcatcagtctcctgtgggtttaattcacatgcaagagcgtcctcgagcctgaatgagcctggaatggaatacagtttcccagcccatgaatcatgacctgaatcatgtcaaattcaccaagttatgctcccttttaaggtcacttggcagacaggcaggtaggaactttcctggtgaaccctccctgtatgaccatgcagctttccactgggarcttttacaggttgctgctatttttataaaaatgatagactgtaatgttgccgggsacagtggctcatgcctgtwatcccagcagtttaggaggctgaggtgggagaaacacttgaggtcaggagtttcagaccagcctaggcaacatggtgaaaccctgtctctactaaaaatacaaaaattagctggacatggtggtgcacacctgtattcccagctcctcaggaggataaggcacgagaatcacttgaacccgggaggtagaggttacagtgagccgagatcacgtcactgtactccaccctgggtgacgaagtgaggctctgtctccaaaaaaaaaaaaaagagttctgtaattgtaaaaatgtgacataggcattctctaatgtgcaatgaatagtcatttttaagcatttcatacaktgttcstgtactgcactggrtctccttgtgctgaactgcatgggataggccatttccatacaatctcatcctctgaataaggaaccatgatgctcmtaaagacatactaaatatagatcytgggtaatattggagtcagtgctggtcatcaatgattttctctgtgatgatagagggggtccactatgaatgatagcattaattttgctgtatgttcttgcatcattggtacataataattcatagacttcataagttattaatatacaagttacagaatttaataatgtaacccacctttgatatgttttcatayacattatggggaaaccatatttttttgaagtcaagaaatgtatattgcttcatgttgcaaaatktgtatgmtwtgtcaaagaagcattgccagaaaatgatctgaaatgtagmacaataaagttacattatagatgtcttaggtgaaccaagagaaaaattagtgtcagagttaaaaagatgcaagtcaggaattaaggcaaaacattgaccctatctgacttaggagaattctggtcatgtgatcttaagaagagagagtaactgacagttctggagactgggaagtccaaatcaaggcatcagcagattcagtgtctggtgggagcttgctgtctgcttcacagatggtgccttcttatggcatcctcacatggtgaaagggaacaaacagsctccctcaagccttttttgtaagggcactaatcccattcatgaaggcagagcacctacttgtaatactatcgtattcgttcgttctcatgctgctaataaagacatacccacgactgggtaatttatttaatggacttgcagttccaggtggctgcggaggcctcacagtcatggcagaaggtgaaggaagaccaaaggyacrtcttacatggcagcaggcaagagggtgtgtgcaggagaactcccctttataaaaccatcagatctcatgagacttactcactatcatgagaatggcatgggaaagacctgtccccatgattcaattaccttycacygggtccctcctacaacacatgggaattatgggagctacaattcaagatgagatttgggtggggacacagccaaactgtatcaactatcatacctcttaatactatcacattggattttaggttccaacatacaaattttgggrggacatgaacatctggacagtagcaatgctagtccattattytggtctgtctgaaggttttatctaggcagggaaaagcgtatgttttttccttgaccttgaaaatttagcttgggctttctttgtacaaacatgaagatcctaggagaagcccaatcaatttkakagagacaagtggatgaaratagggattaaaagaattgtgcttgactgagcagaragactgatgatctgaaaggacaccaggtaaaatgtttctttttagctttacaaatgcactgcttgttaacatctatgaattcatgtactygcttttccatgctatagacgggtaacttccagggctgytgtgtggcacaagtttggggagtagggatggaaatggtacccttaaagttatgcagtgcagacctgcacaacctgacacaggggccttgggtcagtccatgtcggtgagtgtatgatactctgatatcttaaaaaaaaataacataagaatctgtaggctcttgttcaaagatattgcagagacaagaaccccttccacaggtaaagaaggcacgtgagactcatggcaaattcattgactcttctgtccgagcattttcttgtcattttcattatagcccttccttgtaatcttaacatcaatggtaccctgcttcttagcaattttgataaatctttgtatttcagcaaatacttgaaaaaaatgtaggatccactggcttatatcttctgtgtaggcatcaaaacasatggtggtggggttgttgggaagatggtagcagacagrgttgcttaaaaatrtaagacttccttgatgtccaagaatactgagatttatatgattagaaatttctatacaaagctggaaacagtggagcatgttcccayatagaagcacaggttcccagctcccccagaggccctcatacagagctgcagctgcctgtgatggagcctgcacagattcttccagtagacagtcactttccttctttcttggcagtcttgtgccctgacagcccttctgatggctctggagcctctggctgcctgccttcctactcaccaggtgcaacttgttaattacttgcatgcaatatgatcaytggattatggtacagctttggctaaatcacttacatttttcattcttattaatttggagacatgcacgtgccaacccaagtacrataaatggcacactgtttattgcaagcactaaatagatacatcgaaggttatgttctcaggcatccctagcttataagtgtacattatgttgatttgatattgggtgatgaccaaacacagttggtcaaatcctccctctgggagttggagagacatagaaggaaaggaacagaaatgccagtggtgataayagggacagcagaaggaagaggagcagggactgaaagccactgagtcagagtacactgaggcatatgagcaatacctgagtggaatctgtggttgcagggcatccctacctctgcctgcacatctgcttctttcttccctacccccagtttccctttttctccttccctgtggccatagtggaagatggaggcttcacagttcctgagactagatgtcttcagttcaagcagtcagcagagacttgtttttttgttgttgktgttttttgtttttgttttttgagacagagtctcgctgtgtctcccaggctggagtgtagtggcgcgttctcagctcactgcaacctctgcctcccgggttcacgtgattctcctgcctcagactcctgagtagctgggactacaggcacacgctaccatgcctggccaatttttgtatttttagtagagatggggtttcgccatgttgcccaggctggtcttgaactcctgacctcaggtgatccacctgccttggcctcccaaagtgctgggattacaggcagagactagttttttttaactttttttttttttttaacagtcttgctctgtcacataggctggtgtgccatggcatgatcatagctcactttaaccttgaactcctgggctcaagtgatcctcccgtcttagcctcccaagtacctagggctacaggtgcatgccaccatgctcagctaattttcttgccatgatgctgaggcyagtcttgaactcctggcctcaagtgatcctcctgcctcagcttcccaaagtgttgggattacaggcgtgagccaatgcacctggctgagrctggtattttcaaatttcaattctagctgtcagggagagagaaattgattggcccaccagggaccaggtgtttgcttctggtccattcttctataaccagggagacatttatatatataaacttggctgctgaggcccaaccctcaaaacatagagatttgagcaacattagaataaattcttttatttatggaattatttctataggcatatgtcataaccttttattttctttttaagaaatcaagtctacttaatatgataataatatagtcaaagaagtacacagccacgtatggctggatttgatttcttatccaatasctggatctgagaaaaggttgttcagttacattccagaagcttcagtagcaaaactgctcttttttcccccaacttttactttatattcagagggtacatgtgcaggttttttactgaggtatatcgtgtcatgctgaggttttgggtatgaatggtcccatcacccagacactgagcatagtatacagtagtttttcaacccttgctctcctctctccctctcacctctaggcatccctagtgcctagtattgccatctttatgtccataagtacctgatgtgtagctctcatttgtaagtgagaacatacggtatttgtywttcttttcctgcatttctttgcttagaataatggcctccagctgcatctatgttgctgcaaaggacatgattttgattttttatggctgcatagaattccatggtgtttatataccacattttctttatccaagccactgttgatgggaacctaaattgattctgtgtctttgctattgtgaatagtgctgcgataaacatgtgagtgcccttgtctttttggtattaatagagtggtttgttttcttacggatatatacctgaaactattcttgttaagtgagtcaacaaggcccacctggcagaagaggaaacccaagaacattaaatcagttaagatggaggccaaggcgggtggatcactggagctcacgaattcaagaccagcttgggcaacatggcgaaagttcatctctacaaaaaatacaaaactagccaggcatgatggcgtgcacctgtagtcacagctactcaggaggctgaggtgggaggctggcttgggtctgggaggcagaggttgcagtgagccaagattgtgcctctgcactccagcctgggtgatagagccagactttgtatatatatgtgtgtgtacatatatatatatrtrtgtgtgtgtgtgtatatatgtaatacatatatattacatayctaatatatataatatatatgtaataaacatcatgtatatatgatgtttattagccctccaatgcttgaaatcaggggttggaatcaaggctaaccaactctggtctggtcaccatcactgaatgcttgcggtagccatgtgaacattgtttattgtcgtatactcctgggagagtcccagggatgagcttttataaagttgcagacgggaaagggactctcactttggagagaattaagcatgtcacccagttgcctaacaagttattgctgtgcaggcaaaaaacagacaaaagactcacccaactctaagatttttttgatggacttctctaagttcattatgataaagttaatattatgatttttccagttctcaatattttgggtctaaccctttttttattactttatgtatatgttctgggctccgtagactctctggagtgacaagaaaatcttgaaaaataaaaggcgaggtctattggagagctgttcgtggatgattctgatacgtgctcttggttaagaatcactgctctggttttcttcccagtgcctcttacccaccactgttagatcagttctttaaacaccacttmaactcccacttttgtcagcaacctcctcttgacagtcaagctccttagtctggcatgtagcactcaccattacttggtgtgagtcctgaattctgagcagccagtgtctccttatctgtcacattcgtactcatttttatgactttgcaggtcttgctgaaaattcttccttaacttgccttgagaacyaccttttccaccaagcattcccaatgaatgtagctcgtggtgttctttccttccaaattcctgttctcttatctctactgcttataacccaatacttgactatatattgtcttgtataaatgaagtcttttctatcaaagtagatgttcattttcttaggaggaggaatgtctttggtatcctgtacaaaatctagcatagcctggtactcaaagtcaccttaatcatacactaaatggtatctttattgatgggttgtcgataaacctcctgctttatcctgtatccaattaaaatgatccctcgtcagtttttcctctgattcaaacattttaccccacattgtttctgcaattagacagaaaartaagcatctgtgaagtcaacctttttgctttttttactctgaagtgctgctttttttttcagtaagttgtggttttaaaaaaatccagttatttgaatgacatttattatttttgcagttaataaatgtattttaagtttttaaatccacagtgtagataaggccctagaagcaagtgtagacttcgtccacagctgtactccatcggccactgacagtcttattgcattatttcaacggcacaagcaatcatttacacttgttattacccaggggcatttcaaactgttactgaaatgcatccatccctggagtaaccatctgtgaatggtaatgccataaggtagagagactaaatctaattgatatgcaaaaaggagaatttcagctgtccagctatggagattcaaattsaacctttaataggctgaggatttcagctaaatttttaaaatcatgatatctagttcaggcactcatcttttaggtttctcacagattaaagtacagccgtcttccttgaagtaagaacatctcaaagtcaaaaatacttgtttattgtaaaacaaaatgctacagagaaaggaaagttcttgtaaaatacaaagagatcgcttttgttgctatataatagcaaagcagctgcacctttccttggtttttacacttgtttgtgcctcaaattgcctgaaagaaaaaaagggaaaataagaaaatgctttcagatttcagttgcattaaaacataaaaaaaattgggagcaacatttgttaagatattaagatatagtcatttacattaagtggttttataaaagtgatttataatcttttaaagttatctccccctttcttatgacacgtaaccctaaaagagccatttaaattagctgtcaggcaagatgtaccaggcctttccagtgatcccagcccacctggacatatctagcaattctgcagaccagcacatacttctggaaagatgttgcatggtgatttatagatctgtgtggacacataamacctttacaatggagtgaggtcttgaaatagccctgctgttgctgcccattgagagataagtattctcctgaggtattccccaacagctggaaatgaagtagcagctcttgtcagtctgtgacaggagtggattatcagacatttgtaaagagacaacagcagaatcaggcctttttgcaataaaattgcacacatagatattattgctcctccagcgtttcatatgcagtgtcaaggcacgctacagttcaggcagcaggcaagcagctctgtttgaatggtgggacaaacatacctctgtgtgtgaggtgcctgcacttgccctgctttgtcagggaggacacaatgccactttctctgctcctcagcatagctcaattccagctcccgggatgaattaataaagagatatagccgagggcagtcttagttggggctcaggttaccagctgtcacattactgaaatctcaggatatgcttacagtaattgaaggaaagcacattagggttatattgactcagaatgaggcactctctgggagatcaccgtgaacagcattttgggagcaacctagatcatttcccctaaaattctgacatttgctttttggtcttctgggctccaggtacttattactctttcctgaagagctgttaactggctgtcaagtttacattttgaaatagtgccatgatggcatccctatgcttggtattatttaccccacggaggagatgtgtgtattgcagaacactcatgtttagatcagccaagagaactgcttggaacaatcctagaagcaggcaaagctgcattttatgttcttcatatattatttgaaaattactagtggtcaagaaacattccaactgtttgaattctcctctccaaacaggaaaattctgtaaaattgtttttcatatatatatgtataacacacatacattttataacacatacatacacatataagcatatactaaatgagttagtaaatatacaacactttgaactgttgcctgggatataattactggcataattacatgtgctcgttattatttttctaaatcaaaggtctggttttcataggcttaaaaaataataaaattggatgttaatggtacaagttttgaaaatatttgatattgattcaggagatgaaactgtctagaaattactcttgtctattataattaagtccagagtcttattttcagagataagtacttgatccctacttttgtgtgtcaatttgaatttaattttttaatgcatgtcttttaatactrccctttattatagatgcagacgttaatgaagaatccagtcccatttgtacaaatgccaaggagtttaccctctattgaagggatgaaatgttggtagagcaaatgcaggtgtattattatgattacttttggatactttgtattaacaaattttcagacacattcctaaagattctggggggctggagcaagcaggcaaacagaggtccacatactctatgtgtaaatactaaaagtgatcaatcaagggtgctctccaccctttctgcttcttctggaagctaccaagattcctgggtgcccaaggatacctgttgggtggttgcaggggccacctaaccccaaatttccttgccaccattcccttcatcctctcagcatgacagctggtttcctacttttcctcttcttcccccttttttctgtctttggccaaagcttagtgaattttaccttagagattttacttttaacctattcccatattttaaatgtttccacgtattcactgcagtgtgctgatggttggaggtggtaatacagtttcttggttaaggtgtggtctttggaatttgactgcctgtttaggtcctggctccccactattagctktgagaccctgggcaaattacttaacttttctgtggctcaggttccagatgtaaaatgaaatttttaaaaaagcaacacctttaagttttcttaagaattaaatgaggctgggctcagtggctcacacctgtaatcccagcactttgggaggcttacacaggacgataatttgagcctaggggttttttttttcttttttttttttttttgagatggagtttcactcttgttgcccaggctggagtgcagtggtgcaatctcagctcgctgcaacctccgcctcccgggttcaagcgattctcctgcctcagcctcctgagtagctgggattacaggcgcccacccccatgcccggctgatttttgtactttttaagtagagacagggttttgccatgttggccaggctggtcttgaacttctgacctccagtgatctgcccaccttggcctcccaaagtgctgggattacaggcgtgagccaccgtgcctggcccaagcccaggaattgagatcagcctgggcgacacggtgagaccctgcctgtataaaaaagaaaaatttaaaaatttaaaataaaaaaaaattaagtgagttaatatgtggaaagaatacctctggtatataggaaacactcaacaaatattagctattctttttcttggaactctgaaggtggcagacttgctccctcttcctgtgtggagagaagcccatgtactttatttgtggacagtcatctgtgattctcatgaatggctttgcttccttctcatgtggctttcacacttatgcagagctttgttagaacctctgctgcatcctgcagtgtgaaatttacattcccacctctccatctccattggtttgtgagcccttcaaaggcaaaaattgtgttctttggttttgttttcctagggccttgcacagcacttgccactcttgattaagcatgcttaagaaatgcttgttgagtgagtgcgtgaaaggggggccaataacttgtatggttatttgtacgccatcaaacttttttttttgagatggagtctcgctctgtcgcccaggctggaatgcagtggcacaatctcagcgcactgcaacctccgcttcccgggttcaggcaatactcttgcctcagcctcccgagtagctggaattacagtcgcgcaccaccatgcccagctaatttttgtatttttaatagagacggggtttcatcacgttggctaggctggtctcgaacttctgacctcatgtgatccacccaccttggcctcccaaagtgctgatttacaggcgtgagccaccgcacctggctcatcaaacgtttgatttatcggtttcctagcatataaactagctgcgaagatgtgtatttttttgagaagccatgtggagagagtaggggacacagaatctgctcttcaggcatgctgacagcaaaaagtgactactagtaggccatgagggatggaagagagaaatactataaaaagcatagttgtctggggctatttaaggaagacacaataacacactgcacatcccaggacccctttcaggcatcactataatagcatggtgtaagaactgtgtcctctcagtcctgttcagcttcagccactactatcctttgtctattaatacagcaccaaccacttggtcccaaaggaacgttctggcgagaaatgtgcagagwgaatcagttcgccagcaggtgcgattctggaattgtttggctgccagagacccggtatttggtgtgtccgtcattactgggtgtttgtgtccccaagccagagtcatcatgttgaccatcctcctgaactggggctctggttggattcccacctgtttacctggtgccttaacgttcttctccacttatcttgccatacccttcctggagaggaaagaagacaattaatttctacctgtagtttgggttctccttcaagagaaattacaaaactgcctgccttggacccagagctttccttctttaggatggtttgggcctgacagcctgaggtttgaatctggtctccaccatttcctagttcatattcactctcagcaaatatttaactctctaagcctcaaatttctcacccacaaaatagggataataatatcctgttgttgtgcccttagatgacgcatatggcatctaacacatacttagcatgtggtttagtctggcacatacttagtattcagcaaatggtagctgctacccctcccacggccatgtcccagctactggaatagctcactctggatattgttcacttctggaaccaagcccacctttgccaggcagcctcggctaatcccttagagatgtccccacagcaagggaatctctgctagcatgccttccatggcctgttttgacaagatgtttataattctccaggttgttaagaaaaggttttatctttaaaatgtaaagccatcgttagctaagctagcttaaaaattctattgtatactttagaaatatttccacaaatatggctaaaataaatgtaaccactcttggagaggcaatgttcatttatcttgaaatggaagtgcctcacttttttttttttaatggagcctcaatacagtctgaaaaccaggtggaaagtgtttttcagtatcaagtgtggtaaataagagctaactgattcaaattacttttattccttatcatctgatatgaaaatctgaatcatcttgaaatacagtggtgccccttaaaattgcttttctgtcttatattcattcattcatgcagcaatttagggtttattatatacaaggtagtaaggtgggtagatattcctgtttgtgactgttgaaacattttttattaagtttcaggtatcatacacacatacacagatacacacatgtgttttgttttttcccctcttattaaaacttaacacatgaaggtagataatatttcaattgtacttaagcactatctaaatttgctttatgtgcagcaagactatgatataaccttgtaaatatctaacttcattaaaaacacacatttatacagaataggttaactctgtggctctctgagcaatatcttaacctttagtctggaagccttaatgacacactaatatctaatattgcctataacttcttcagatccggaaagaaaagtgatataaatgtcattatgtcttgagactcacctaaatgcaatctttaacatgacttactgagcccccaacatggtaaaagatcttagcctgaaaacactccttgtcaaatcattgcccatcatagtgctgagtagtaatctctccaggctgaaagatggcatgccgtataacaaatgaaagggagctgacactagaaagaacattagtgaaatcaatatgattcaaccagagacacagactccgttaatggtatgtcaatatgaccaattatttccacagcactgacatcatgattgtatttttttcttcatctttaggagagaacagttttacttaaccgtaattgttgaattatagccattggccgagaaagtcttggatgttttacattgttatcgttaccagtttcaatttgtctttatttgatatctaaactcctgatcataacttaccatagtttgaaggttaagatcaataaagtggaccaaacattcagtgaattgtgaattctagaaatgcctgatggtatccactgcccagggaataagatgtaatggaagcaggcagaacttgaagagcaatcagagattgtaaatataatcagaattgaattcatatagttattttgttaatttctgcttcctcaactagactgtaagcttcttaagtgcagggaagtatatattttacttgtcattgtatttgtcattctatgccatgtctatcacctggcatagaaggcactggatgaatattttttgaataattttctaacttttcatgaatttttgttcaattttctcatattgggaagctgccagttttagagttataccaacactgccataataaaaaaaagctgtcaagatcaggaaactgcagatactttygcaggttccagaaccagcaaaggaatgccccttaccatacccgtcagcacccatgaagtaagggaatggacactgcaacttctggtagcaccatcacagagaagggaagtgccttcgtgagcaggcttgatggcagcaacagccatccctcggtctcacatccccctttgtaatcccacaggcatgtgtctgattggtggattctaaaccaccctcagaaatgtagctgcaaaggagtatgaaatgtgcaggttttaatattccagcctctgctggaaagaaggcttacagaaagaagttggaatggatgttgagtgccaatctactgtatctattctacttccttaaagcttacattccattaacagtctttggaagaatgtaatataggcgaagatttttcagtgccaaaaaataactgacatggataaatgacatgaggcagtgattaagtatgggctccagagtgatgctgtctgaagtcaaatcctcttccacctctatgggaatccatttccatatctataaaatgggtatcatctttcttcaaaatatggctttgaggrataaataagaaaaacagtacgatatgcctagcagagtgcctggctaatggtaattcatcaatagaggttagctattatacttccaatccttattcttcaaatttttgttttcctggcaggaaacggagattctttaattaaaaattaaaatttgaggttgggtatggtggctcatgcctgtaaacccagcattttggcagacsgaggcaggaggatcgcttgaattcaggagtttgagaccagcctgggcaacatagcaagaccttgctctgctaaaaacaaacaaaaraattagccaggcgtagtgatatgtgcctgtggtcccagctactcaggaggctgaggcaggaggattgcttgagtttgggaggtggaggctgcagtgagctatgattgtgccattgcactccagactgggagacaaagtgagactctgtcttaaaaaaataaaaaataaaaaatttgatattttataattttaaattatggttttaacatatttagttgaaaaggactcttccaaagcctcatgaatatctcttacacatgttaaatgataacgcaggggtcttgagttctgaggattgttccagtatttctacttgctttttattagctccacacctaagcaaccccaaattgagaacgattttcattataatagattttcatataacattttattatttaattcttcctgccttcttttcattaatttatgcagcatttgagggtttattatgtactagggtactgaggtggataggtacttctgttttatttgaatgatataaattcttatttctttaataatatttttattataagactaatacatgtttattgtggagaatttgacaataaacaagtgtatagagaataacattaaatcacctataatcccactctacagggctgttggtagcaaagtgatattttcctctagtgtttttcttgcatatccttactttttaggaagacattatgtattcagtttggtatcctgcttgttcactcaagactgtattatgagcatgtttctgtgccattaaatattcttggaaaacattttaatggcttgatagtcttttattatatgaaatataaaaatataaaaattgctgtttcccgttttccagtattgtagtcatgtctttggaacatagattctggtgctcaccaaatattccatgtggccctttctatttcctgccttcctgttttgttgagttagaatcatgagactgatatgagtcagtggcccatgaacagaatccactagtaccactcacaggccaatggtcagaacccaagacccctgcgttatcatttcacatgtgtaagagatgttcatgaagctttggactagtctttttcaactaaatatgctaaagccaaaattaaaaactatcaaatttcaaaattttttttttattttctgttttttaagacagagtctcactttgtcttccaggctggagtgcagcagcacaatcatagctcactgcagcctccatctcccgtgtgtttcctttcttcccttcttctcttagtgaaacgaacttagaagtggcatatggcgaatgtcacagctataagttggaggaggaactaccagtctactttcaactttacctagactgatgttgagtcaaatcattgagacttacagatttgtctattatagcagcttgtgttaattatcctgataatgtatagaatgtatcttgtttaccaatggtattgatttattgttatattttttaaggaatctttgcagttttaatggccatgctattatgccccaattctcattagcgcacttaaaaatcagttctttccaccctgtaaactgaaaataaatcagaatatatggttcaaaagtgaaagactaaagaaagtttactaccacgcaatcctatctttgtctctttctcttttttattggcgtcaaactactcagtattttagactgcaaaatttccactgcrtggaggaaagtaaatggattgggattatttcctgcaggtaaatgaaactttatggtatttgttatggaggcaagtagggtactyakagaaagccaaatataacctgtccctccctatcttttccttagttgtgagggtcaaaggggcacattacagtctggattcagaaacccctttcaacagcacgtakatagttaaagagaaagattgttcttcaagggcctctaaggacaaaagtgaatccaytaacactctaggaagcagtgtgactactggaagaaagacattcaagaggtraaatggattttakaaggtcacasgagccaattgtcagtgtttgtactcttcatcaaaattatttttaatgagctccctgacaactgcgcatcctgacagcacgggtgaagtggctcatctggggtcatgcccgtgcctgacactgccctaattagctgacactgctctgctttgctgaagcacagggaggtctctcgagaaagatccagaagggaccatgataaatcggrcaaaatattccttgagagcctgaggttcacatgagagctcagaggaattacaataaagatggattaggaaaatggaatattaggaggggaaagactagagttactagaagagatatttgaaaagagattccaggatttactggacaggtttgtttaaaagtatttgagttggccgggcgcggtggctcatgcctgtaatcccagcactttgggaggccgaggcgggcggatcacgaggtcaggagattgagaccatcctggctaacacggtgaaacaccgtctctactgaaaatacaaaaaaattagacgggcgtggtggcgggcgcttgtagtcccagctactcgggatgttgaggcaggagaatggcgcgaacccgggaggcggagcttgcrgtgagccgagatcgagccactgcactccagcctgggcgacagagcgagactccgtcacaaaacaaaacaaaacaaaaattagctgggcgtggtggtgcgtgcctatagtcccagctactcgggaggctgaggcaagataattgcttgaaccagggagtcggagattgcagtgagctgagatgcgccactgtactacagtctggtgacagagccagactstgtctcaaaaaaaaaaaaaaaaaagtatttgagttgatgctcygtcaaaactcatttatcaagaggatttggttttaggcaacgaaaccttgcctcaaactcatttccaactcagcgggtttgaagatgtgcaaggattcatctgttcaaaagcaaaacatgataaaacaatgcagaacacctcaaaaccatagagaagtacctgtggaactgttcaggagtcctaaaggggctcattctaagtggaaaattattgttactctttcttgagttgtttctgtgaattacgaaaaaggcctatctcagtgaacagaccatgttgatcatactatgaagcagagattgtagagattttattaaactgccatacttctcagttcagagctgttttactccttctccctgggacatttggcaatgtctggagacatttatttatttatttatttatttatttatttatttattttttatttattttttggagccagcgtttcgttctgtcacccaggctggagtgcagtggcgcaatctcggctcactgcagcctctgtttcctgggttcaagcgattctcctgccttagtctcccaagtagctgggattacaggcgtctgccaccatgcctggctaatttttgtatttttagtaaagacggggtttcaccacgttggtcaggctggtctcaaactcctgacttcaggtgatccacctgcctccgccacccaaagtgctgggattacaggtgtgggccaccgcgccaggctatctggagacatttttgattgtcacaactggggggatgcttctggcatctagtgggtagaagctagaggtgctgctaaccatcctacactgcacaggacagccaacaggaaagaatcatccagtctcaaatgtcggtagtgcccaggctgagaaagcttgagttaaagtaaacctgataacctgtatttaaatgaataaaagggataagactaggggagaataaagctgtccacatttgtaagcctctaccaagcacagtgcctgatgtgggattacagacaggcgcctgtctcagtgagatcatagcatcagtaatccctgtaccgtatgtagtcccagattggaatccttgaccgaaggcaagttctcaacctctctaagactcagttacaaaaamgagggcataatagtgtctcttgccttataggttttggtgaaaattgaataagaaaacatcagtaagkatgtggcatggtgcctgacaatctttagatgcccaataagtggtagctagtatcmacatagaaataaaattgaaaagatacacacacaatgtttgcattggttatccttgggtaatgggttttaactttgtttcctagattttaaatttttccaccataacacgtattgcctttataataacataattcacktgttttaagtcgattcaggaagcttctgattmtatattataaattctaaatgttcccttctattttccagagtcaagtttagattatctagatcatgaaataatcagatattttcagctattacctaactcatgagtgtgtggaatgctgtggctttctgttattagaatgaaataaaaatgaaaaataaattgcttatcaatattctgagatagcaaagcaatgatgcatttatgatagactggatgataggatttgtttttgctgaacttattcatacatatttgtgttttgcttaractttaaaattgtttctttttctatgagcacatagcaataactgggaagtggctgagaatcattcttttttttttaatttttgagacggagtcttgcactgtcgcccaggctggagtgcagtggtgagatctcagctcactgcaacctctgcctcctgggttcaagtgattctcttgcctcagcctcccaagtagttaggactacaggcgcatgccaccatgcctggctaatttttgtatttttggttgaaatggggcttcaccatgttggtcaggctggtctcaaactcctgacctcaggtgatctgcccaccttggcctcccaaagtgctgagattacaggtgtgacctaccgcgcctggcctatcattcttatttgacagggatttccctattgctgggtgctaagtgattgagggaaacccagaaacagctttgtgttgtggttaacagcacagattctggagccaggcttccttgtaccaaatctcagccctaccgctaactagctttttgacttcagtgaagtttyttaacttccttgtgattattttcctcatctttgaaaaaggaataatgtcctcaacaggtaacatgaaggttaaaaggagatggcgtgtgtgtgtrtrtgtgtgtgtgtgtgtgtatacttgtgtatctcatccctaaacaaagcctggctcatagtaggccctatataagtgcttgttactatgattgaaagttggatatatttttaaatttctatttttcaatcttttgcaaagaaggaaaacacaactttgataaaggtaattttggtagacattctctaacatgtaaactgcttgtgtaaactgggaaataccagattgctctaaattaattagttctatatttgttcaattacactggattgtgttctgtgtttttattttgttttgtttcttgttttctactcacatggtgagacttggcttgggtgagtcatttctttgaagaccctcagttcatactaaggggcaaaagcagatgagggtccagggcaaggcatggaagccaactgctcagtggtttcaacccgggcttcatgggaaaaggatgggagggtggggttgggtgtccttgagattgaggtgagaacagttgcctgagaacaggaaccagaaagtcctaacagcggtcgatcactgataacatttgtgctgaaaacatttcaggcccaaactgtctcagccatgctgagcaaggcaggaacttgggatgtgaaccactctcttaatcgggtccactgtgtatccaaagttgacccttgagggccaggcacggtggctcactcctgtaatcccagcactctgggaggccaaggcaggtggatcatctgacgtcaggagtttgagtccatcctggccaacatggtgaaaccctgataatacaaaaattagccaggtgtttgtggcgggtacctgtaatcccagctactcgggaggctgaggcaggagaatcgcttgaacccgggaggcggaggttgcattgagccgagatcgcgcgattgcactccagcttgggcaacaagagcgaaacttcatctcaaacaaacaaacaaacccaaaattgaccattgagaaaaacccttgctttgtgcccatctgttgtgaggagatgggacagccttgcccctgcatggaatctgctcaggagctttagtttctgtagtagaaggtgggctctgtgattaactctgtggagtttaaggatctgggttcagtgagcactcaggctctgatggggaattgtacctggaacggttaattatctcgtaaaaagatcaatggaaaaattattttcaagaaaaataatagataaaatttacctactctgatacttagcacaataaatatttattgaactgttgaatcttttctaggtatttgaagttttattttcaggctagtggcttttgaattctgccacaggagaattcagttctccttctgaggccttctgaggaggggagagagtgaaaggaagggaagaagcagcttggcctggacccattttttccattaattttttttttcttagtagagacgagctctctgctatgttgcccaggctggtctcagactcctgggctcaagcgatcctcccgcctcggcctctcaaagtgttgggattacaggcgtgagccactgtgcccagcctggacccattttatatactagacttttctagaaggttctctttgaagaaaagttttctctgctaaccacactttgaaaaattatttctgtaggaaaatgatatattatccttygataacctaggtcgctggacagcttttgttaaaaagttctacccatgtggctttagcttccaaagatacacttcctttttttgagacagagtctcactgtgttgcccaggctggtcttgaactcctgggctcaagtgatcctcctgacttggcctcagcctcccaaagtgctgggattacaggcatgagccactgcgcstggcccccaagatacactttcaccaaactgtgtttcaaagttatgcttttaaattgtatttaaagttcatataagaacaggcttagctgtgacactgtagaggcgagaatgtggagttgacacgggtccttttcacacttgttccccacacagggcccacatgaaacctgtccctgagtttaatcctaagaaaaaccttgtttcactagcaaataattcccttctctgagaaggcaaattaattattttatttccaactttctcttaggcatcctgaaattytgagctcagtttcatgctctgaaaaagaaaaaataactgctagagtcacagaaatggtattgactttttggattggaatatttgttttctctgttccttacctgtttccccctatttttcttacttcctttccattttattttgtatgcctctttgtaagctgccttaaatgctttttggaatgaggcaggatayacattcaataaataaaatatgtytgagccacttatgaacaaaaccttyttgggccagagcctaaacattacttatataaaaagacctgattcctcaccttctacaacaatattatttagtcatttctctgcattgtactcaactctttaaaggttatagaattgtagttagcgtattagaaggctcatggatmtagattmtatgtcctcagcaggtgaagtcttttttacacaatgccactgtacggattgtagagttcttgggctggcataattttatgtgaccaaaatttggcaaagggtcttatcaktttgaggagagattaktggagcattgaatttcasagtttgaaatgacattagagattatctggtccagtgattctcaaccagggagacatttggttatttccggagatatttttggtcacaactgaggtgggtgctactggcttctakggatggaggtcaggaaagctgccaagaacccgacagtgtacaggacagcccccacaccagcatgtsactactgccgaggacgagaagccctgatctagccaatcctgtcatttttcagactccagggagtttgtgacctgaccttcaaatataagatttaatatttaattgcccaaattcattcttaaaatatagcaaaatgatgagaaatttcccttcaaaactgagaacaagacaaagatgtctattatgatagaccgttcttagaagtttactgctcctcctggggatgcctctcaatagagaaattctacattcccgcctgttgaaagcagacatggttacttgacttgtttgggcctatgaaatgtgaacasaggcgacacacgtcacgatcaggtgggagacttagtaacacatgcctggtgtcccatgcccttttccctctgccagtgttccagggcgtggcaggactgccagcctggtcttggagtcacagctgggccccgaaggcgatgctgtgggacctggaaataaagctttgctgttgttttaaaaatggaatcacattgtaaattaggatcctggggagcgtggcactaggtattcttatgcagagctagatggtgatgctttcctttccttatcacttcaagtctgcagacacagccttcagggcgttcttcttctgtggttcctcagttggggcaccttgtctggagtacacagtaaggctatgccacagtcctgctatgactgagatggcaatatgagtgcttttctttgttggtggtttttatatttatgtttaaaaaattataaactaggctaggcacagtggctcacacctataatctcagcactttgggaggccgaggcggatggatcactctaggtcaggagctggagaccagtctggccaacatggtgaagcccggtctctactaaaaatgtaaaaattagctgggcatggtggcgtgcacctgtagtcccagctacttgggaggctgaggcaggagaattgcttgaacccaggaggcggaggttgccctgagctaagatcatgccactgcactccagcctgggtaacaaagcaagacttggtctcaaaaaatacacacacacacacacacacacacacacacacacacacacacacacacactaaaactgctgacattgagcattatacagtaagacagattttccttccttgtttctttgcatcaattttctctgcctctccctccgttccttttctgtttgcttctactcaggactgggcacgaatgcacacattgctgtctggcttgtatctatgtggtaagtctagaatgatcagttactgaaagaagagggaatcagtgctagtgaaggatataggttgtggttaactggagttcccaagtagctggatcttttgtgacagggattggctagtttggttttataccagatactagttatatagagatgaaaagacaagtttccttcactcaaaggaaccttagcttagagtcttgcagggaaattgatttgcaagcaagctgctttgctcccttactctaaactcacacttgaatctctgatcttaacactttgatggtgaagaaaaagccctccagagaaaaggtagtaagagatccagaatctagagcctttcccaaggcttcaggtagatctggttgaattcaccttgttctctcttgccccctattctcttatcagtcattcccacagctttaagtgttttaaaggagtggaaagctcccaagactcaggcccttatgtcactcctgacatgcacttataggggagtccagagtgtttagtcctccagggtttttatgaatggtcagtgttactctcagaagatgctgacctgggtaggacaggttgttcatccattcatttgtgtgcttaccatgtgccaggcacagttccagaactggggatccactgctaaataagactgataaggtctttgctcttaaggagattccatgctagacattaattatattaatcttgactccagtttatgccctaagccaagctatcctctattctctttcggcatttttcagttgttaaaccagcatcaccaggttgacaacataacccaactaataccaacaacataaagtgcctgagttcaccagcccgctcagctcccagctgactgccccggagtcccgccctgttcaggcagaggcagagtttttttttttgttttttttggagacagcgtctcactctgtcgccaggctggagtgcagtggcacgatcgtggatcactgcaacctccgcctccagggttcaagcaattctcctgcctcagcctcctgagtagctgggactaaggctcaccaccacccctggctaattttttttgtttgtttttagtagagatggggtttcaccatgttgcccaggctggtctcaaactcccgagctcaggcaatccgcccgcctcggcctcccaaagtgccgggattacaggcctgagccaccgtgcccggcccaggcagagttttaattgaccaccatccyttgtccgactcctagaaactttcacctggattccttaaagtgatgccttgctgacctgattggataactcagtattcattgctgagtagctgaggtaagcgtgatgttcacttatttctcagctatctatgagagctgtagcttacattgtgatcattctggtaaatgttctctaagaaagaaaacgaaaaaataatggctagagtcatgttcacctagttttaacatctttagagttttgcttcttctcagttcagtagctcaaagagagaaaaaacacccaaagacagcaattcttcactctaaacccaatattcttcaactttctagaaattattagccacttaatttactttgattttcatctctgaaaaagtattcagacttatatatagttgccagatgtgttcatcaaacacttctctaagaaatttgtatatttttggaattcagtcaacattttttggataaatgaatgtgaacactttaggaattgcttattccacaaatgatytcttaccaagatttccagaaactattttcatattgaaacaaaaacaaaacaacacaccactctgcttcttcccacagagttctgagacagcttttacataatgatcttgaacatattgtaatcttgtttatgacagaaatgaaaagctgtcatcacatttctgttttggagagttcattgttttccctgtgaattcataggagttctttgtctattataaatattatcactttgtcttgaaaatagctttcccttctgtactctttctctgtgggctttatgcatcttttgtcttataaaatgtatgatgtctacagagtcagatgtatctgttttttcctttttagcgtctttattttttgtttaacacaaaaacatctgccagttggtaagttatagaaatattcttaaatttcttctaaagttttaatattgtatttttcagttaaagtgtaatccactgagccaggcgtggtgacatacacctgtagtcccaaccacctgggaggccgaggtgggaggattgcttaagcccaggagtttgaggctgcagtgtacaatgttcacactactgcactccagcctgggccacagagcaagaccctgtctccaaaaaaaaaagagaaaaaattaatccattggattactctttgttttcttctagttaaacatccattgtgtcagcataatcaaactatcttgccctatgaaatgagttgctatctcttgtctatattcacatcttttcccagattttctgttctattcccactgatgtatttacaggccagtatcacaacctgtgaaagcattgtcttcagtggaaattttaaaatagtaattactcctttcattatttttttcataattttcttggttatttccagatctttacttttcaatgaacatatttttaaatcgcttaaatcattcagatctgaaacctcattggcagtctaattggagtgaatcttctgattcacaagcatgaaatgtatgtatttctgtttattcaaaccttcttttagtattttaaatatgcgttttgttgtctttttcatgtaggatctatacctttcctaaatgttttatagtttcttgtaaatagaattttaaaattcccattctatctggttattgtaactataagacaaagctattgatttttttcctctttattttctagcatttattatttgcaagcatttattagttgaccttttggggtctgttttctcttttgaatgtgtaagcacaaggtagatcatgtttatcttgtttactagtttatccccagcattctggcaggacaaatgaatgaatgcatgaatggatatctgaaaaagcgtttgagaggagattcaacaatctacactactttcccttttcttctttttaccttgtgtttctaacacatactaagctttttttctttttcttctgaaatggggttttgctctgtcacccaggctggagtgcagtgtcatgatctaggctcactgcaacctctgcctcctgggttcaaacgattttcctgcctcagcctcccgagtagctgggattacaggtgcacgccaccaagcccagctaatttttgtatttttagtagagacgggatttcgccatgttggccaggctgctgtccaactgctgacctcgggtgatccacccacctcggcctccccaaagtgctgagacgacaggcatgagccaccaatcccagcccattctaagcttttaacatccttagattactgttccaaatacgttgggaaggtcccccaattttttccttaactttttaaaagcaactttattgaaatatattttatatatcataaaaatcacctatttcaagatgattttagtattcaataatttttagtagctttactgagtgatgcaactgtaatgtaacgatagatgttcaggtttagaacgttttcatcctcctaataggatctctcatgtccatttatagttaatccctgttcgcacctttacccctattcacaagcaatcgttaatttacttcttgtttcagtggatttgcctgttctggacatttcatataaatgagatggtaccatatgtgaacttttgtgtctgactgctttcgcttagcataatgttttcaaggttcatctatgttgtcgcctgtgtcagtattctcttcctctgttgctgaataatattcccttgtatgcatgtactacattttgtgtatctgttcattagtttttggacatgtaggttgtttctactttttggttattatgagtaatgctccagtgaacttcacatgtaagtctctgtgtggacatatgttttcatttcttttcrgtaggtacctaggagcggaattggtggttcattttatgttttttgagaaattgtcaaactattttccaaagtggccacaccattttatatttctagcagtaatgtatgagggttcctattcctcttttcttaacatttttctcacagtttattgatgtatgattgaggtatcatttacattgaggtataacttacatatgataaaatgctcagatcttaagtgtacagttcaattatttttggacacatgtatacatgcatgtatacaaccactgcgtcaatcaagatacgaaacatttgcatcattctagaaagtcccttgttccttgccctcagattttgatttctatcattctatcatactgttttgatttctatcattgtagattagtgtttattccagaatttcatacaaatcaaatcatacagtatgtactcctttgtgttgtcttctttcactcatcgtaagggtttcgagtttcatcagtgttattgtgtttatctcagttgtttgttcctttttattgctgagagcactccattgtatgaatgtcccacatttttgtttatccagttacctgttgatggacatttgagtcatttttcatttgtagttattaggaacaaaggtactattaaacatttatataccagtctttttgtggacatgatttcatttttcttgggtgaattcccaagagtgtaattgctgggtcatagggtagttatatgttacttactgttttttatctagtattaagtcactttacaaaattctttaagaattacagttttttggccgggcatggtggctcacgcctgtaatcccagcactttgggaggctgaggcgggcgcatgccttgaggccaagagttcaagaccagcctggccaacatggtgaaaccccatctctactagaaatacaaaaattagccaggcgtggtggtgcgcacctgtaatcygagctacttgggaggctgaggcatragaatctcttgaacccgggaggtggagattgcagtgagctgagatcacaccatggcactccagtctgggcaacacagctagactcagtctcaaaaaaaaaaaagaatgacagtttctaaaatatcgtgtctttgattttctaaattattatacaatttgctgataggtataattttgagttagatctttatctgttgatctggaggagtttcygggactttttttttttttaaagaagcacacaagttgcccagaaatgtatatagtataatccaaattttgtaagacaaacaataacatgtatgtatatgttcgcgattctataggcaaaagaaaagatgtgaaagatgttcactggcatgctaaccatggtttcgtggctggagtggcggaggtggttaaggggaggtgtagagggttgagtttacaaaaaaaggaaacagggataaagaaaacacattattaaagttaaatgatttagtagagtataaatatataaatatatttatatatttataaaaatatataaatatatttatatatttatataaaatatatataaatattttaatatatatttaatatataaatatttataaaaatataaatatttatataaaatataaaatatttattgcaaaaactttttaatgataaaaatattggaaccagcataaagatgagcttaccaaagttatttgcagctgttaaaaatagtgatatacgtgtgtttagaatgtatgttaaattcaaattcagattgcaaagcagtatgcattctatggccctgactactttgtgctaatatgattgtgattatgggcatttttgtttactttttaaaatcttatgggggaaaaaagcaggagttatttctagaagtatgaatcactgaaacacagtaatattccttaaattatacttttcttaggatagctgtaattatataagatttagtcaaatctttaattagatggtaggctgattgagggtagggatccctcaagattctatttgtcaccgtcagagctcagaataattctgactcattcataacatgaagagatcaccgttgaacacagtccataggaaagtaagatctcagcattaaagagatgcaggtatgagtgttaaagaagagcaggccctggtcagagtattctccaattgacgtcaatcagttctccacttgattgacctggagagtactttgacagggcctgctcttcatttacataggctcggtgcctaccttttgcagctgaacaggctcggccccagttcttgctgggttctaagctacagtttcagggaaaaggcagaaagccaagatagggcaggaatgggatgaaaggggactggcctgttggctaggtcagcaaatttgtctgtgatttacagcactaagctcaggatttgacttgattagaatttgattgcctttcatttgattcaagttggagccactgctccgggctgttctatctagtggatggaccatagaagcagggatctcatgacttagcaatattaaaacctcaggcaggtggcttgttggtctgagcagcctctaaatttgtacaaaagcctggtggctggctgggttggtaaaaatggcagytgtcctgcatgctgacattgggagttactctgcactgctgcaggctgtcctggcacactgcaggccgggcatcatttcatggtggaggacgtcactcagttttgcatgaggctcttgcatcacatttgtatttaaggaattcacaccttattttagggaaaacatctgttccttggttaaaacagcattgcacttttaacagagcggccacctttttccacatacgataggacaggttttggatatatggagtattaactgaaaagagcactatatatttcatagttctttaaagaccattgatatgtaaatcaatgtgtaagaagatatcgtttaagaggggttatggcacatggtggaaggaatgctgctttgcatttatcygtgtgaagtaatctgcctgtgcatctgaagaaacagcaggccccgccgcaagtgatgaagcagttctgtggagaaacccatttacaccagtttccagatgctattccaccagaaataattccaagaatatacttatattttaaataaatgataaaatcaatttccagatgaagtgtacattacaaagagaaacttggtattattatgtattaatccatattaactaaagttgaacctgacatcaaaatattgatcccttcttaaaatagacaaaaatactttragttaaattgtttttcttcctatttgtgctagccggtgcttaaagtctaatgatgtgataattgaatagtaaaggaatctaaatctctactttcttgattcccagtgtgctaactttactaaaattgtgggaataagcaaaatatttttcatagcagtaataaggatttttaaaaattatgtgacaattgtgtattagactgaagtaattaatacctttgtcacagggaccgggtgcaatggctcatgcctgtwatcttagcactttgggaggccgagacaggcagatcacttgaggtcaggagtttgagaccaacctggccagcatggtgaagcctcatcttactaaaagtacaaaaattagctgggcatggtggtaggcacctgtaatcccagctactcaggaggctgaggcaggagaatttcttgaacccaggaggcaaagattgcagtgagccgacattgcgctactgcactccagcctgggcaacaaagcaagacacgctctcaaaaaaaaaaaaaaaaaaaattggcatgagactaaagaggatttaaggtggaggatttcctcgcagtaggtaaagaagcaaagccctgtttattcagagcctgagctcagacttgaatttcttttttagactttcattttctccctttatgaagtggcaaagtcagttaagtatagatgtggccgtctatgtccctgarcttctgggttcaataatcagctctgcgactcctcttaaagaatccagaggatttcctgcctggaccttgaagtcacctccccgctacatatttcccagctctggttttccacctcctcaggatgaatgtcttcttgaatgtcctctggaagagtgtcagctgcacttaaacttccatcaaaagggggactcagaggccttaaaataggcatcaggtacacattctatttatgattctgggattaggcctattttttggcatttcctgtggtcaaatttttaatttctgaactttatcggatttccaaagataccgtcccttggctgtcttcattgatttcttcaaaggatttcctcggcaaagttaccctagtcttaactggaagagcatggctcccttaaagagtctaaaataagccttttcctttagtgactcccagctctggtcttgtcaggttscatttttctcctaaccttcttctttcctaatcctcactcactaattcaaaaatgttattctgccttccagaacatcacactttgtaaacattttgttaataataaaagctagcattccttgaatactggttttgtaagctagattatctcatttaaccctgtgatgatgttattcattaaggagcatttgctttcttaggtctgcaacatcagtcactcctcgcccatctgtatcccagcttttaacagtttgttactgctctttcctatcatattctcttgtgggcaccaaattttyttttttaattttattgtatctttagaggagttttaggggagagtaaaaataaatatatttttcaatccatctttacccagaaattgaaatattactttttatagtagaaccagaaattaacttaagaatgtttttggcatttggagacatgcatacaaatactaaagaggtgcttataaaaaaattacacttttggccgggcagagtggctcacacctgtaaccccagcagtttgggaggccgaggggggtggatcacttgaggtcaggagttcgagaccagcctgcccaacgtggtgaaaccctgtctctactaaaaatacaaaaattagctgggagtggtggcatgcgcctgtaatcctagccaccggggaggctgaggcaggagaatcgcttggacctgggaggcagaggttgcggtgagcagagatcaccccacggcactccagcctgggcaacagagcgagactctgtctcaaaaaaaaaaaaatttactttttattataaatttgtcatatttaatgccatggtgcattatagttctggctacaaaatgaaacaatttatttttaaacttgattttttttctctaacatttgaaatcattaaaagttactatcaggagcctctcattttatgcatataaatgcaataaaacagctggttatcttatgctctatatgaagggtaatattttaagtgcattttcaaattcagctaagctagtgattctatcagaaaatatcatttttcactcactggcttttgaaacataattagattttctgagcaactgttgcttataattggaatttgcttattatmattttaacagagaaaaacactgacctatgtaattttagtgcaattaaatttttctccttatgcctgtgtgtacctcatcaattcagcaaaagcaaaacctgatctagaagtccctgtgcagcagattgcagggaaagaagcagtcagctgatttgtctgggccataaaaccgtggtgtctggcagaattgtgatagtaattgctctaagatgcattctgtttacaaagactaacattgcagctgcttttaattagctgctagaaatgaaaaactgtcagggtatgcttgttagatctacctgaatttattccattgcaaataaagcagaatttaaagaatatcaatgtaaaacaggaaacttctcattgtaaaccaagttcagaaaggtggtggtaaatatctgaatgtatccttttggttttatgggaagcagaaaaacctgatttcctatgacacagaccattgcattctgtattgtattgttttcttttttctttctttctttctttcttttttttttttttttttttttgagacacagtcttgctctgttgcccaggctggagtacaatggtgcaatctcagctcactgcaacctccacctcccgggtccaggcaattctcctgcctcagcctccctagtagctgggattacaggtgggcgtcaccatgcccaggtaatttttgtatttttagtagagatgggctttcatcatgttggccaggctggtcttgaactcctgacctcaagtgatctgcccaccttggagtcccaaagtactggaaatataggcatgagccaccatgccccgctgttttctacatttcttttatatgtaaatttctgtcctgagcagatgattcacttccagagaaaaggatctttgcattccctgctgtctggcattgtgcataataaatatatactggcaaatacataatggtagtatttttatttataaaagtatgagaaattgctttgagaaaatcaaagggttagaaataaaagaaaattaaaagcattgttacaatttatcatgaaatttagtgagtattacagagctttgtacactgggttagaaaatttgtgtttttttctttttcttttcttttctttctttyttttttttttttttttttaaagagatagtgtcttgctctgttgacaaggctggaatgcagtggtgtgatcacagatcactgcagccttgacctagactcgagcaatccttccacctcagcctccagactagctggaactacaggtgtgcaccagtgcactcagctcattgttttattttttaaatgttttgtagagacggagtcttgctttgttgcccaggctggtctcaaagtcctggcctcaagtgatcctcccttctcggcctcccaaatcctgggattacaggggtgagccaccacacctggtcttaggtttcttaattttatttctctgtgtttctacaggcttttaggccattttactaataattacttttttttttttttttttagtttttttgagacagagtcttgctctgtcaccaggctggagtgcagtggtgcgatcttggctcattgcaaccgctggttcaagcgattctcctgcctcagcctccctagtagctgagattacaggcacgcgcgccatcacgcccagctaatttttgtatttttagtagagacagggtttcaccatgttggccaggctggtcttgaactcctgwccttgtgatctgcccacctcggcctcccaaagtgctggcattataggcgtgagccactgttcccagcctgctaatagcttttaaaaaggaatattgattttcatagttgtgtggcagacacagctgacaccactagctaacttaagcatactctgagaatgaccttgcatggcagatgcacctgacacaaaatttaagcataacctgaggatgaccctgtagcctaagaagaatgtgtattcagagttcccagctaataaatccaggaaggccaactgggagagtcattccttatctgtgagtaacatctgaaccctcagcccatcctgtggaacacaggccatataggggattgaggccctttgttttgggttagatagaggttgctagggggagggtgctaagcaagaatgctgtataaactgcatgctttttacaagcagttgccattgtctagtccagcccgtcaccactggaccaccctgtatgtaaatcctctcagtaaaccttgtctcatttactggctccaggtctctttgaaagcctctcaaacatggcgccatccctattgcagccattagagtccggcgtggcagtggtcaggactgttgaagaaggctgagaatttagggcactgtgaagtgtttaatcatttatcaaggtatcaatttagtgtctctcaaggaaaaaacatatttgttgatttgatttcatgccaacactgatgttttttgctactctatggccttgaatagtcaggcattgactgtaaccaaaaggatgtatggaaaataattgttttcttttttgagatggaatcttgctctgtcgccaggctggagtgcagtggcgcgatcttggctcactgcaacctccacctctcgggttcaagcgattctcctgcctcagcctcccgagtagctgggattacagacgcatgccaccacgcccagctaatttttgtatctttattagagatggagtttcaccatgttggcyaggctgctcttgaactcctgacctcgtgatccacccacctcggcctcccaaagtgctgggattacaggtgtgagccaccgcgcccggccaaaataattgttttctatccttagtgaagagctaaagagaatttccttagaataacagcaaaggaacttaaagtgttcagaaaaacaaagtgaggatggtaggaatcctttcgcctgaaactttggaaaaaggtggaygaattacaactaagtcatcttttagctttgctttcttgatcttccttcaaagtttatgatacctaaattctctcttcaactcataaaatgtgttttatggtttaatagaaaagctataagcacatgacaaaattagttcttattagctatatgcctacagaaccaattttgtggttttcaatatgatatgttcaattccagaaggtgttttataaatcagttggtaggaacctgttttatgtgtaagctgtgtccagatggatgtttctttacccttttatgtacctggaccaatagtaccagaaaccatgggagcataaccaccccacaagaactccacccctgccacagccttcactatttggcaggggaagcagagactctgccatcttcaagccactggtagagcccctttcacatgacctgggaggtaatttcacaagcaaagaagtctaaagraaaggttgtacctaatttaaattattgcttttgtcatattctctaccactcacaggaatgttttattattaatcacaaatcataagcaatttatactcttgattatttcaaaagagccacatccactgctatggttttgaaattattacattatacattattagtcagcttagactaaattatgctgtggtaacaaaccccaaaatttcaagggcttacaacaataaaggtttgtctttcatgctgtacattcattgcaggtaactaagacactattccatgtcactgtcattctgagatatgggctgaaggaacatcctctccctgaggctttgctagtgtttcagtagacagaaaaagaacgcaatgggaacacacacaatggttcttaaagcttcagcttcaaagcagcacatgtcatggcactcacactttacaaagcaagtcagacggctgctctggggacctgcagtcgtgcaggagaggggctcccaaatcagacagccactcctggcatcaatgacgcagggatctatagtccttttatgctgaggggtggtgaatccaccacagttaacaaaatcttgagacttgccataaacaaattctcatctgtttgtgtgatgaggtccagatgatggcccacttcagtagcaaagacagtgcactgtgctcaccacgccatttcatcttttccctgggttgataggaagatggccttctcaacccctttgcatctgtgtggggccaggagactaaacaccgccagttgattatgaggaggaatgacgtgtggcacttccagacctagctcacaaacgtggcaaaatccactctcccccaactccttgagcctgtctctccaaattgctgcatagaggcaatgtttccaggagaacctcacctggccagaaacatctgccttgaacatggttagaacaaatgaaacttttttgtattaaaacacwtgagattctgtggctcttcgttactgtgttaccctatcctgaccttgctttgtggtttatttaatgatgcacatttactagagtggtgtacattcaatagtgaggtggccacatacaacatacccctaaaacattgctgaaagtacacagccatttctactataaaaatataagtatatgagtgaagaactgatttttgaattttgctttaattaatttaaatttaagtggtcacatgtgggtagtggccaccgtattggaycacagaaccttaagcagtaggaagctttttgctacgtgatgtattataaatctttccactgtctcagcaatctaaacataaaaccaacatgtctaaatttcacactttctagatgatgaagagtcataaaatgaacagaaagtctttatatggtgtttcagggggacagttgtgacattggagtgctggtcaaagttctttattattttttatttgtttccaaatatggagtgcagaaaaccaaatggtggaatggacatttttgccaaagtataattgtggtctttaatgatgtaaaataaaataccatattcatttctgaatttttttcatcgtgaagtgtgtgagatgtgacttgacaactttgcaaatgtcgtgcctctgcttaaatctctgcattatatttatggaaatgtttgagatcctggaaaccatttagaggtgttataaaatactttatttcttgaggtccaaaagacttcaaaataggggctgagtgatataatggaaagaacactggattaggagccagaatatctgggttaygttgcctgctctctcactaactggctcagtgaatttgggcaggttatttgaactctctggatctcggtttcttctatggtgagtttatgggcttagattaatcacccacctctaaaattccaggtcttttcttttttctgactttaggtcaggtcttttcttgtgaagtattaaaactgagcccacccatgtcaatataacttaactctttgttccacgaaattcgtgcccaggaagataagacagtaaattaataaataaattcactgtttgctttaggaaagtcttgcaaatcaatttatcaggacaaacagtttgctcatctgggcaaacagttgtcttattaaaacaatatattgctcacctgggcaaacagcttgacaagtttgtgaaagaatgtcactatgcattgtggttttgaaaatgaatctatgggctgggcgcggtggctcacgtctgtaatctcagcactttgggaggccgaggcgggcagatcacaaggtcaggagttggagaccagcctgaccaacatggtgaaaccccgtctgtactaaaaatacaaaaattattcgggcgtggtggcgcgctcctataatcccagctactcaggaggctgaggcatgaaaatcgcttgaacctgggaggcggaggttgcagtgagccaagattgtgcccccgcactccagcctgggcaacagagcgagactccatatcaaaaaaaaggaaaaagaaaaaagaaaatgattctatggaaacagyagacactggggactccaaaagaaggacaaagatgtaagaactacctattgggtactatgtttattatttgggtaaggaattcagcaggaacccaaacctcccacatcacacaatatatccatctaacaaacctgcacatgtacccctgaatctaaattttgttgttgttgttgttttttgagacggagtctcgctctgtcacgcaggctggaatctactataaatgcatttttttttttttagacggagtctcgctctgttgcccaggctagagtgcaatggcacgatctcggctcactgcaacctccgcctcccgggttcatgcaattctcccacctcagcctcctgaatagctgggattacagaaacctgccatcatgcctggctaatttttgtatttttgtagagacggggtttcaccatgtgggctgggctggtcttgaactcctgacctcaggtgatccacccacctcggcctcccaaagtactgggattacagtcatgagccactgcgcctggccaactataaatgcaattttatttactatttaactgggagtagaatatcttagtatgtaagtctaggtatttttccaactagcacaacacttcagatagtttatatattggtgagattaattacaagattagtgagcacatcatagacattgagttaattatgacaaggtgaatgaacaaaaccaattttctgtgtcaaacgtagtttacaactttatgtaaacatttatcatatacattgtaagaaattcagttttctgtaaaaaaatacgtagtcttaagtttacaattcaaaacccatagaggttccctgacattacttgccaacatttaagagctacttattagtttgaagagagacagagtatgtgcacatttaaacttaaggcagaaatttgtgtctgttggcctaagtgttctttgttcactgggctctgaagaccatcaaataaaagtaattcttaacttagtgtttttggcactgaatcttgaattcctttttttttttttgagacagagtctcactctattgcccaggatggagtgcagtggtgcaatcttggctcactgcaacctccgcctctggggctcaagtgattttcctgcctcagcctcccgagtagctgggactacaggcgcccactaccatgcctggctaatttttgtatgtttttagtagagacggggtttcaccatgttggccaggctggtgcatcctgaattcttaaataaccagtaccaaagttatttttcttgaaccttctcactaagtatctttatcgcacatgagttctctctttaattttaactaaggcctaattaaaatattttcaaatttataatttttattttctcatgaagcctgataggaaaagctttgcccttaggctcatagttttacctgaggaaattcaacaatggatctgaaagcagcttattgaggacatgcagttagaacttaagaagaatgtgcctttaaggaggaataaccctgagaaatagttccatgacatttaaattctattgctctgacagagccattctgacaggttttaagtttcaaagttatcagacaatgtgcagacaacctcaccatctcctgagcttcacctcactgttaaccagcctatggtaatgtctttctctttttctcctcctcttcctcctactccctatccttgccctgtcaatattggatataatggcaggtcagaaatggggtgaggcatgaggtgaaaaccaaagagaactgtgcagaaggttaagggttaaataacatcaggcaaaccagccaagtataactagacattagaagttcagctctagtataaaagttaaaagacaaaagtattaaaaatcactatacctgcataatttgttgatgaatacacagtataaaaaggtgtaaagtgtgacatcaacaccatagaatggtgggtgggggataagtaaaagtgtagtaattttttttttttttttttgagacagggtcttgctctgttgcccaggctggagtgcagtggtgcaatctcggctcactgcaacctctgcctcccgggttcaagagattctcctgcctcagcctcccgagtagctgggactacaggcacgcaccaccatgccaggctaatttttgtatttgtagtagagatggggtttcaccatgttggccaggttggtctccaactcctgacctcgagttatctgctcacctccgcctcccaaagtgctgggattacaggcgtgagccaccgcacctggcaagtgtagaatttttgtatgcaattgaagttgagttgttaccagtttaaacagaatgttttgttttatgtaaggtccatggtaaccccaaagaacctacctttagtagaaacacagaagataaagaaatgaatcaaagcataccactacaaaaaaaaatttaaagtcacaaagcaagactgtaagagaggaagaaaggaacaaatgaactgcaaaacaaaacaaaatagttaagtccttaactctcaataattagtttaaatgtaaatggattgaattccccaaccaaagataaacagtggccaaatggattaaaagaaaacccaagatctaacaatattcgtgtgtacaagaaattcactttagacttaaggacatacataggctgaaagtaaagggatggaagaaaatattccacgcaaatagtaatcaaaagagagcaggagtggctttatttatatcagactaaatagactttcagtcaaaatctgtcacagaagacaaagaagatcactatataataataaagaggtcagttcatcaagaggatataacaattataaatatatgtgcaccccacattgaagcatctaaatacataaagcacatattaacagagctgaagggaaaaacagacatcaatacaacaatagcaggatgcctcagtacccctttcaacagtgggtagattatccagacagaaaatcaatgaggaaacagtggcctgaataacattatagaccaagtggacctaacagrcatacacagaccatctcatccaatagcagcagaatacacgtttttctcaaggacgcttggaacattcacaagggctagattatatgttgggccacaaaacaagacttaacaaatttaagaagattggaatcatctccagtaccttttctgatcataataacattagaaattaataacaggaattatgaaaaatggacatatgtagacattaagcacacactcctgaacaactacttggttgaagaagaaatcaaaagagagattaggaagtatcttgaggcaaatgcaaatggatacacaacataccaaaagttacaggatgcagcaaaagcaattctaagagggaagtttagagggataaaggcctacattcggaagaaagatcttaaacaacctaatttcacaccccaaggaactagaaaaagaagaacaaactaagcccaaagtcagcagaaggagacaaagattggagcaaaaagaagctaaggagacagtagaaaagatcaacaaaactgagatttgttttttgaagagaaacaaaattgacaaatcctttatctagctttaccaagaaaaaaagagagaactcaaataaatgaaattataaatgaaagaagagatacaggcataccttggtttattgcactttattgtactttgcagatattgcattttttacaaattgaaggtttgtggcaaccctgcatggagcaagtctgttggcaacgtttttcccgcatgtgctcactctgtgtctctgtgtcccattttggtaattcacacaatatatcaaagtttttcattattgkattatatatataatattatgtatatataatatgtaatatatataatacgtatataatatataatatatgttatatattatatgttatatgcaatatatgttatatataatatatattatatataatacatatatattatgatattattatatcacaatgctgattgtgatcagtgatctttgatgttacaatagtaattgctttggggtatcacagactgtccccatgtaagaaggtgaatttaatcaatagatatcatgtggtctctgactactacagtgtgggctctgctactgttctgactggcctttccctctcattgagcctccctattccctgagacacaacagtattgagattaaaccaattaataaccctataatggcctctaattgttcaagtgaaaggaagagttacacatctctcactttaaatcgaaatgtagaaatgattaagcttagtgaagaaggcatattgaaagcccagataggcctattgtgtcaaacagtcaagttgtgaaggccaagaaacgttcttgaaggaaattaaaagtgctattccagtgaacacacaaaagataaagcaggccaggtgcggtggctcacgcctgtaatcccagcactttgggaggccaaggtgggcagatcacaaggtcaagagatcgagaccatcctggctaacatggtgaaaccccatctctactaaaaatacaaaaaaaaagtagccaggcatggtggcacgtgcctgtagtcccagctacttgggaggctgaggtgggagaattgcttgaacccaggaggcggaggttgcagtgagctaagatcgtgccattgcactccagcctgggtggcagagcgagactctgttaaataaataaataaataaataaatagatagatagatagatagatagacaaataaagcaaaaaaacctattactgatatacagaaagtttgagtcttctggatagaagatcaaaccaaccacaacattccgttaagccaaagcttaatccagagcaaggtctttcttcagttctatgaagactgagagaggcagtgctatggaaggagagtttggtactagcagagactggttcatgagatttaaggaaagaagccatttccattacataaaagtgcaaataagcagcaaatgctgatgtaggggccgcagcaagtcatccagaagatctagctaagattattagtaaaggtggatgattttgaggggttcaagacttcagtggaggaaggaactgcagatgtggtggaaacagcaagagagctagaattagaagtgaagcctgaagatgtgactgaattgctgcaatctgaggataaaatgtgaatgaatgagtacttgtttcttatggatgaacatccttcttaaagatggaatctactcctggtgaagatgctgtggatattgttgaagtgacaacaaaagatgtagaatatttcacaaacttagttgataaccagtggcagaatttgagaggattgactccaattttgaaaaaagttctactgtgggtaaaatgctgccagacagtattgcctattacagagaaatctttcacgaaaggaacagttgatcaatgcattaaacttgtcttattttaagaaattgccacagccaccccaaccttcaacaaccaccaacctgatcagtcagcaggcctcagtaatgagacaagaccttctaccagcaaaaaagattgtgactcactgaagacttagatgatcattatcattttttagcaataaagtatttttaaggtatgtacattgttgttttagacataatggtattattgcacattactagactacagtatagtgtcaacataactttcatatgcactgggaaaccaaaaaatggatgtgacttgttttattgtggtatttgctctgttgtggtggtttggaactggacctgcaatgtatcagaggtatacctgtattatagctaataccaaataaatagaatcataagagactactgtgaataattgtatgcctacaaattggataacctggaagaaatggatcaattcctagaaacatacaacctacaaagattgaatcataaaaaaactagaaaatataaacgaccaaataagtaaggagattaaatgagtcatcaaaaacctccagcaaagaaaaaccccaaactagatggcttctttggtgagttctactatgcgtttaaataagaattaacaccaatccttctcaaactcttccaagaaattcgagaggagggaacacttccaaattcattttatgaggccagcaacaccctcataccaaagccagataaggacactacaagaaaattccagatcagtatcactgatgaacatagatgcaaaagttctcaacaaaataccagcgaacctaattcaacagcacactaaaaacatcatacaccataatcaatgaaatgtatctctgagatgcaaggatggttcaaatatatgcaaattagtaaatgtgatataccacattaacaggatgagggataaaaatcacatgatcatctcaatagttgcagaaaaagtatttgacaatattcaacatcctttcatgattaaaaactattaacaaatcagatacagaaggaatatacctcaacataataaaggccatatatgacaagctcacaactaacatcctactcaatggtgaaaagctaaaagcttttcctctaaaaccaagaacaagagaaggatgcccacactcaccacttctgttatacatagtactagaagtcctagctagagcaattaggcaagaaaaagaaacaaaagacatccaaattagggaaagctaaatagtctctktttgcagatgtcatgatcttatatattaaccctaaagattccacagttagaactaataaatgaattcagtaaagttgcaggatacaaaattaacatacaaatattagttgcatttctgtatactgacaactaaccagaaattaagaaaacaatcctatttacaatagcatcagaaagaataaaataggccaggcgtggtggctcatgcctgtaatcccaacattttgggaggccgaggggggtggatcacatgaggttgggattttgagaccagcctgaccaacagggagaaaccccatctctactaaaaatacaaaaaattagccgggcgtggtggcgcatgcctgtaatcccagctactcaggaggctgaggtaggagaatcgcttgaaccgggaggtggacgttgcggtgagccgagatcatgccattgcactcccgcctgggcaacaagagcaaaactccatcccaaaaaataaaataaaacaaaataaaatgaaataaaataaaatacctaggaataccaagaaggtgaaagatctgtacattgaaaactgtaaaatattaatgaaagaaattgaaggctggggcrgaaggattgcgtgattccaggagtttgaggctgcagtaagtcatgattgtgccactgcactgcagcctgtgtgacagagtgagaccaaaaaaaaaaaaaaaaaaaattgaagacagaaataaatggaaaggtatcctctgttcaaagagtggaatagttaatattgttaaaatgtccatactactgaaagcaacatacagattcaatgcgatgcctatcaaaattttaatggcatttttcacagatatcagaaaaacaatcctaatatttgtatggaatygcaaaagacyccaagtaaccaaagcaatcttgagaaagaaggacaaagctggaggaaccacttcctggtttcaaactacttcctggtttcaaactacattacaaagctctagtaattaaaacagtatggaactggcctaaaaacggccactagggtcactgggacagaatagaaagactagaaataaacccaaacatatatggtcatctaatctttgacaagggtgccaagaatacacaatggggaaaagatmatctcttcaataaatagtgttggaaaaactggatatctatatgcaaaagattgaaattggacccttgatttacaacatatacaacaattcaagtgaattgaagacttaactgaatgtgagatttgaaatcgtaaaagtcttggaagaaaacatcagcaaaaagctcaaccttggtcttggcaatgatttttttggaaatgacaacaaaagcacaggcaacaaatgcaaaaataatgaaatgggactatgttaaactaaaaaaacttctgcacaacaaaggaaacaatcaacaaaattaaaagacagcctaaagaatgggacaaaatatttgcaagccatatgtttgataaggagttaatatccaaaatatataaggaattcacataaaggatttcacrtaactcattagcaagaaaacataaagcccaatttaaaaacggacaaaggacttgaatggacrtttttccaaagaagacatacaaatggctgacagacatgtgaaaagttgcccaagattactaatcatgagagaaatgcaagtcaaaaccaccatgagctatcaccttgcacctgttataatgactttatcaaaatgacaagagatagtaagtgttggcgaggatgtggagaaaagagaatttttgtatattgttggtggaaatatcaatttgtacaggaattatcaaaaaacagtatggacgttcttccaaaatttaaaaaaagagctaccatatgatccagccatcccacttctgggatgaaataaaatctgtgtcttgaagagacatctgcaccccatgttcatagcagcactattcacaatagccaagatatggaaacaacctamgtatctgtcagccaatgaatgaataaagaaaatgtggtgtgtatacacaatggaatattatttagccatgaagaaggaaatcctgccatttgcaaaaacagaaacgaacctggaggacatgatggtaagtaaaataagccaaacacagcaagacaaatattgttttgtcttacttatatgtagaatctaaaaagttgaactcttagtaacagagtagaatggtggttgccagggtctgggggtgagggattaggggagatattagtcagagtgtacaaacttttagttttaagatgaataagttcagtggatctaatgttcaacatggtgaatatagttgacgatactgtgtttacttgaaattagataagaagatagattttaagtgtcagcactgcaaccacacacagatgataactgggtggtgatggatatgttagttaatttgattgtggtagtcagtacacactgtgtatgtatatcaaatcatcatgttgtacgccttgaatatgtacaacttttctttgttaaataagtactttaaaattttacaaaagacatttacaagccacacttactcatcttgggaaaagctatcagtcatttaaagcaaagcatcctttccttttcaagattttactttttttttttttttgagacagagtctcaggctagagtgcagtggcacgatctcagctcactacaacctctgcctcccaggttcaagagattcttatgcctcagcctccggagtagctgggattacaggcatacttcaycatgcccaactgatttttgtatttttggtagaggcggggtttcaccatgttggccaggctggtcttgaactcctgacctcaggtgatctgcccaccttggcctcccaaagtgctgggattacaggcttaaaccactgcacctggcctcaagattttacttatattttaaatgtctacatcttgaatttcaattcttattctacctagaagctaaaagcattggcagggttatgagttggggtggaaatatttgggcctgtggaagataaattcatattgtttgaagaaaataatctgcttataattatcagtttattataatcaggcccaaagaaggaaaccaaaagtcttaatattttcttagtgataaagtggaggaagtaactgacaaagtaattttggctctttaccagggatgcttcatataaaggagggagaacaatttccttgacaaccaattaatatgtatagcttaaggctatgactgtattctgcaagaaatagattacatttctgaggtctgcacatctgaagatattataaactagctaggagatttttatgatgatatgatacagatcagcaatacgtaagacagaaagggggyttcacccagcaagagttaggatttatagtcccagtrtgcccgagttttacatattgtgaactttgctaaccttcacctttatcaacaagctgtgagtgactctccagcacaaagctttgagtatcaagcatgcatatagtaaaaaaaaaaaattgccaggcaccgtggctcatgcctgtaatcccagcattttgggaggccaaggcgggtggatcacctgaagtggggagttcgagaccagcctgaccaatatggagaaacctcgtctctactaaaaatgcaaaattagccgggcgtggtggctcatgcctgtaatcccagctactcgggtggctgaggcaagagaatcgcttgaacctgggaggcagaggttgcggtgagctgagatcgtgccattgtactccagcctgggcatcaagagcaaaacttcgtctgaaaaaagaaaaaaaaattatactgatgatttgggggagagcaccaaatacccttaaagtttttacggcacagactttttagtaaatcttatgaggggatgattatgggaataatatgcatatatmtatatatatatatatatatatatatatatatatatattccaaaaatattggcaaaaataatgaagaacctgaaagtcctccatggtcagagttaaggtcagggtcagggatgaatgttgcattagttggcaataaaaagcagccattgtacagtttgacaggcctgtgtgaatatcctgctttgtagctgagtgttcttgcttgttaatctgcttcccctatccccactcttttttttttwtwttaatctggtggttgagaggtgcttccaagcctacctattttatttaccacttcctcgttagttttttgggcttcttaaaatggtcctccactcttatgacttctggctgtttgtacacaagaactgtccacctctctcctcctgccgtcaagggtgttgctaaacctatcatcctcaacctgaagctccttccacatccttcttgccagctcactatcagtcatttcctgagactgacatcacaaaagagtcattagatttaagccctggtttcagcaattactggacctgttgtgattctagacagggttcttaacttttaattttccatgacattttttcccttgacatcccagtccaagctgttgacttttgcatttactgctcatttctacctttaatattccattttcctctgttaatattatatgctgtgaaacccaggagaagtcagcattactatggtcttgggtagaactgagagagataaagacatgaatttgaggctgttgggggatgagttgcagagaggcataaatacgaggcagaaaataagttatgagtgagaatacaacttattaatagcttttgtaaacttctggcaaaaaaagatattgaagataattagagttgaaaaattatatargacatcacttasgattgggattcaatcacattttatagaaaattcaaataagagttgcttaagcatgaaagaagttcagaggtaagtagctcagggcttgtatggcaactccatggtcacagggggcccaggttccttctcacattgttttctcccatccttggtgctggcttacatgccaaatgtctcctcatgaccacaagatgctcctggtgttcccagaccaaactgagggttgggctgctatttctcgtggcccaataacgagaagcagatgaactggggaggaagagtttttatttctgcaactggttatggggggaaggcctggaaattatcaccagaccaactcaaaattacagttttccagagcttatataccttctaagctatatgtctacgtgtaagtgtgcattcatctaaagacataagtgattaacttcttctaatctatagctaaggtctgagtcytgaagaccttcctctggagcctcagtaaatttacttaatctaaatgggtccagctgctggggtgattacccttattatgtctcctgcttaaatcacggaggtttggggagttccttcagacctccaataaacttgtttgtggaggtctggggagtttcttcagacccacaataaaactcgtttaatcctaaatgggtcctgttaagaattcctttgttattttgttatgctttaaggcccaggaaaagcctaggcaaaactcttggtgggctttygttacattccagcctttgtataagggcactggcttttttaacttttaatatttaacttaaccactcagtcagtactgaaacagttgttatggaggcctgcgttagtgagagctggcctgccacactggtgctccagctattatgtccacgttccaagatggaagaaagtataatggcaaaagtacctatctctcagctgaatcagtttgctttaaagggcttccttggcttccatccacttctgcttacacttccttgaacacctccagaaaccaaggaggttgggaaagctttaggctgaggacattatcactccaaataacatatttttaagtcaggaagtgggaagagtggatattgtgtaggcaactcacagtcccttccaccatagccgaccaggacagagatagctggatgatggtttgctctagttgagcctaaacaagctcatggctccctctccttaaactacttttatattttctttctctaagttcagagcaaagctttcatattattttatgaatgtttcttaacaagctcatcgtttctggtgttttgctgcaattctgcagtagatagtatggtatatttggtggacagattcagggccaccaggctttgaatagcagtggtgctacttagaagctgagaggttatgaaccttatatgcaaccatagggaatagtgttgttactataaataatgattgtactgaaccttatatgcaryagtgaataatgttattataaataatgattgtactgaaccttatatgcaacatagggaataatgttattataaataatgattttcagactgaggcagttttctaaaaattcaagtgaaagatcacattactttacatgaggaccacaaggcacattcaaaagatacggttgattcactttgttaaacaataagaatataagtgtccaaatacagaacaaaggaaataatatgtccaagaaacatttttctttgcttaatactaaaagcctcttgatctgtttcctatatcctagtcacaactgaattttaagaaagtcgaggtcatgttggtaactccatgtcaatactgctttktgtactaactgcaagatcaggaatcgtccctcattacttccatcttggctttcaaaagagcctactgtaattttttcttctgaaatagtatgaaataacttttttcctgaaagaaaatctcctttctatggttctttcttctgaaacaaggctttccttctctgagcttccagctagaataatttcctctgacatactctgatctaggaggattgtagtgtggtcacaatgcctcagctgatttcagttaattttcttgagctgaatcaaatgaatgtcttaacaagttgtcctttaaaaggatagacgtgcttttatacaaaacttgcatttaaatgaaaccactagacttcttcatacaatgtaatgaagtcttggtattccagcgatttggcayctaaatgcataggcactcagtaaatattggagggaaggaggatggtggaaagaaagaaagggggagcagggaaaattaggggggaaattattttttcttcctggggataggtttcatttttaattgggaaatgtaatgtgaaatgtattactttcaaacttgaggacccagaatataacttatgatgatttaagttttcttccttttatttacattttaatgataaagacactcattggccaagacccagaaaaaaagtttaaataaaaatttacattttaatgataaagacactcattggccaagacccagaaaaaatagtttacctatattttatacgtgtttgtttaaaaaaaaaaaacacaatctttgaaaaatctggagaatttatttcgggttataatagtcagaaaatgtgtgcctttaagttttgcttctgaatagacatattctgctaagcaagcaatctcctcttagactgcttgctgagcacatatactttcygtatgctgatttttaaagtgtctgtatttggttggtggctttagtaataagagactagcttttaacacagccagaagaagctgatgtgaaccascagaaataacactgatcatatataatacktatggaacagtggttgcccaccatttttgaacccaagatttcctgacatttatcactgtgccaacaaaaagaaaaactaggaacctggggaggacttagagagaggaagcatggacagctgccagcctgggcagatggcgtctgtttggttgagacagattcaccaggaaacaagatcagatcctagtttgagacccaaaacctggtgagtaagaacaagtgttcaggacttcaaggggcccagtaggcaattgtgggaaaaaatctggaggtcctgaacttgcccaaattacaggggtaggtgagaaaaggtaatccaaggggtaatatttttttctgctttttggtgttatctatattttctttaacaattatatatattacttaaaggaaaaaactctaggtcttatatattcctgactaagcttcatcaatatgtatttgcttcttttatacaaagtaacattgttttcatttacagattgccattaggataccttagtaatgatgtccagttatgatgcagatatttcaaagtttattgtttatttatttattattattttggaggcagggtcttactgtgttgcccaggcttgggtacagtggtgtgatcttggctcactgcagcctcgaccttccaggctcaagcagtcctcccatctcagcctcccaagtagctggaactacaggtgtgcaccaccatgcctgtctaatttttatattttttgtagagatggggtctcgccatgttgcccaggctggtcttgaacacctgggctcaagagatctgcccgcctcagcctccccaaatgctgggattataggcgtgagccaccgcaccaggcccaaagttaaaataacttamtgaataaggtttggatgatgtcaggtaccccttttttctcaggggaactggctcctacttagatatcttatgaccattagtgggacattataggatagcctagaaacagaaacactcacgtcagtgtgatttatggctaagctggcactcgacatcagtgggataggagggggtaatacattaaatggtgcatgggaaattgattattcgttcagaaaataattgaaatggatctgtacttcatttcatacacaaaaatcaatttcagggagattaagggacttaagttataaaaggcaaaactttgaaacttttggaaatagtataggagaatagctttatgaccttggaggagggaaggatttacaaatagtgttagctataaggcaaaggtttggtcattgagccatcttaaaatcaaggaaattacttcatcaaaagacatcgctaaaagagtgggagagaaaaaccacacactgggagaaaatatgtgccatacatatgtgtggcaggcacacctgacagcaacaaccgaagcataccctgagaatgaccctatggtctaagaagaatgtgtgtttggagttctcagctgaggaacctggtagtggccaacccggagactgattccttgtctatgaggaacatctgaacccccggcccatttcggattaaaggagggttgccaggtgaaggttgcaggaggggagctaagtaaaaatgctatataaactgcatactttttagaaacggtagtggttcgtccatccagcctgctaccactggaccgctgcatatgtaagtcccctcgagaagccctatatctcatttgccagctctcggtctcttctttggcctctcttctttggcctctcgaacctgtgctatccctatccaactcaataggggtctggcacaatarcatgtaactaacaattaggaaacagaaacctgtcttttagaatgtgggacttctcttcatcaaaagcactgtaaaatgagttaagaaacaacccataaatacttgaggaagatacttgccatacatgtaactgacaaattaataaaggaaaaaggtactctggagaaaaatgaacaaaagccytgaatagaaactacacagaagtggaaatgtgaggttgggcgtggtggctcacacctgtaatcccaacattttgggaggcctagacaggtggattgcttgagcccaggagtttgaggccagcctgggcaacatggtgaaaccccatctctacaaaaaatgcataaattaactgggtgtggtggcagacatctgtggtcccagctacttgggaggctgaggtgggaagattgcctgagcctgggaggtggaggttgcaatgagctgtgatcatgccattgcactctaacctgggcaacagaggagaccctgtcaaaaaaaaaaaaaaatgaaaatgtgaatggtcaataaaaatgtgaaactacttaacttcattagtaatcagggaaatgcaaatgagaagcaccaggtgatactgtttcacactctccggggcggccaaaatttttaagtcttaamaaacaaccctaacaatgtagagtcacaaacaggaatccttagacactgctggtggcagttgaattagtacagccactttggagaactctgcagccttgtcaggaagagttgaagctgtgtgtaatccacaacactgcccacactccacagcaatgcttctcaagcctggcataatatattagcatcccaaaatgagcatgttggaaatacttacacctggcccttaccccagacctgtgattctcaaatggtatgccaagatgccctggggaaccacagcaaactcacagaagacgatgggatatcttaaatgttcaakgggaatgcagtgatacttggcatctgttgaacgcagtgtgaattactagctcaagacacttcagttcagtctcaatgttaccccacgcatcatccctttctattatgcgaagctggattttcagtggttgctgtaacaaaaagcagatatcatgaaaatcagtatggaagaggaaataagggtgatagagtccaatatgattccaaagtttaagaagttgtatagtgcccaacgagtgcacacattccattaataagtaattgaggttatttaagaatgaaataaaacttttttctttggtattttcatacagatttttcaaacagctactgcattgttaggacaaaaaagacttgttaacttttttggacctaactacttaaatggaattgttaggaatttgttctaggggtgcctagaaccctgaaaaaattgagccacttagtagtgtcccttcaactgagaatatttgggaatctctttcccaaattarttaactcagaatggagatggaatctctatgtctttgtttttaaaaagctccccaagtgattctaatgggttcgtaaggttgagaaccactgcttgagagactcttgcacatgtgacttaggataatgctactcaaattgtacctgggggccagcgctggtttgcaaattatttcctacagatctgcagcaagtttatatgaatcatactttcagtgaataatggtacagtttttgtaatcttttgtcttctgattaaatttactgaaatataattttatgtcaaattttataatggaaaaattgaggcttgtactttgtgcttttttctcatatttttctaatatttatgattttacagctttgttgatgtataagtgatcaatttgcactctttaaatatgtgcaatatattatatgtcaattttgacatatgtatatacttgcgaaatcatcaacacaaccaagataatgaacatatccatgactctctaaagtattttctcatccctgtgtaatctctcccatttggccctccacatcccttcataatcctccactcctgtccccgccccagtgcaaccactcatctgcctgttgtcactatagattagtttgcattctctagcatttcatgtaaatggaatgttactgaatgtactcttgcttttgtctggcttcttttacttagcataatgttttgcaattcagccatgttgttggataygtcagtagtttactcctttttattgccgattagtattccattgtatggatatgccacaacttggttttttattcaccaattgwtggatatttgaaatgtttgcattttggctgctatgaacatttgtgtgtaaatctttatgtgatcacgtgctttcatttgtcttggataaataaatacctaggagtggaatggttggattgcatggtaggaatatgcatatagtaatttatttttattgcatttcacaaataaaaagcattagcccacaaggattagaaataaaactctcccaggccgggagcaggggctcatgcctgtaatcccagcactttgggaggctaaggtgggctgatcacctgatgwcaggagttcaaggccagcctggccaacaaggtgaaacctcatatccactaaaaatacaaaaattagctgggygtggtggtgcatgcctgtaatcccagctactcaggaggctgaggtaggagaatcacttgaacctgggagatggaggttgcagtgagccgagatcacgccactgcactccagcctgggagacagagcaagactccttctcaaaaaaaagaaagaaggaaagaaaactcttccttcagcaaatgtattttgaaaagtactagcctaagttaaatgcccaasagtgttcacagctacattgtttataatagcaaaagactggaaacaatccaatcatccattgtcaagagaatggattattaatatgaagtatatatccagtagactactttataacaatgaaaactacattgatgtagctgcagtttatctactacattaatgtagctgcagctacattaatcagaatgaataaacggaatttaaagttgagttccaaaagcaaattgcaaaagagtgcatatggaaggatttcatcatatgaaktttacaaacagtattttactacaatattaaatagcattttatttacagaaacatacatatatggtaaactataaagaaaatggtgatacaaaatgcaggatagtgtttacttggggagtggccraaggtacaatgagagagataggaccaaggaggacagacagaggcctttgaggctagtgggtcttggtcccgttcttaaactataggaattcattttaatgttacattttgtgtttatattttgtcataaattttttgtgcatattcaatatgtaaccacaaaatacaaaaaaactctctaaacagttgacaagggagtttattaagcaaatagaggtaccaattacaaaccatcagggttagaaaaaaaatccaggctttaagtaaatataaatctaagtaataggctattgactattatcttagaaaaacttggggtattacaccaggttatcacagaatatttagttragaagtatggaaaatatgatatgctatttatttgaatgatactcggtaggcatgtaatgtgatgattaaatcagttaagaatatgtgatagattttttttaaaaaaacatctcatttaaaatgcatgtcttttgtttttatgattattgaaaaatggttttcagaatacaaaatgagaatcaaaaattggtaattagatattctgtgtttctcaaatggayggactttataattgggtggagttatgttaaaagctagaaaaactgaagaagttaagaaagaattgaaaattcccattaagagaaaaaagaaaaagctgcaacctttgctaatataaaccgtaagagcctatgcctcttgaaatttctctgtgtttgtctttgtacatttttaatgacttaatgagaaaaaagattcatcaggactcctttcctagcaggaggtttartgtttcacaaatgagtagggagctgctctcataatgaggtaaacggccacctgattcttggataagtccaaggaaaacctttacaccagaggaagcaacagcttgccagtgttcaatctgagactttccaaggtcagaagagaggaggattggtattgatatttaataagcatttactgtgtccaaggcattttggtacgaattktatatctcttatctgatatccttgccttttaggactaggctgtttttacctttaaggtagatgttattattctcattttacacatgaggtaactgaaacatagaacttaaaaaccttgccaaacatttcagaggaggcagatttaaacccagatgcatttgcattaaaccccaatggatttgattccaaagcacgtcgtctttctgctaataatagccaacagtyattgagtacttactatatttataccaaggtctgttccaagtgatacatagattttctcttttaagcctcgtggcagtatgagaaagaagctattattatccccattttacagatgaaaaaatggagtcacagaatgttatgtaatttgcccaatgtcacacagtaagtggcagagttggtccacctcaggagcccacactcttaacctcttttggccttttatgagtacatctgccctttcaaggatcaggcttgagtctgtcagggaggcctcatgtctcctattaacttttgagccatacgcatcatggaaactggtttctcctggctgggtacttctgagttgcctggcctcctgtgagctcttcttttctaattgaatctactctctaagactctttgctgctggaatatgcagcagtagtttgagagacacttctcagtcagttctaacaygtttagctaggttcttcctattttttgtgcttcatcagatcatttgggctcagtgttttctttctttttatttttttctttttttttgagacagtatctcacgttgttgcccaggctgcagtgcagtggtgcaatctcagctcactgcaaccctgcctcctgggttcaagcgattctcctgcgattctcctgcctcagccttcagagtagctgggattacaagcacctgccatcacagccggctaatttttgtatttttaatagagatggggtttcactatgttggtcaggtggaccttaggtgatccacctgcctcagcctcccaaactgctgggattacagacgtgagccaccgcgcccagtctgggctcagtgtttttcagtggaataaggatgaatcattagaagagctttcatacctcttaaactctcaaattccatgccttaataaggatttttattaatacttcatttaaaacaaacagtaattaagcatcattttaaccatttgatgtgattataactcatatgctttctactccaaaaatatttgaagtagaagaaaccaatacaatgggataaacacaaaaaaatgcagaacaatgtagagaaaacagagataattatacaaaaccttaaggtattttcgttattgctgttgagcatttaatgctgaatttcctggcagctgaggcaacagaaaggtaattggtcagataatttttgttatatgttcaaataaagtaaactagttcattggggaggatagggtaccatgtcaggccactagccaacccttttcttcctacaagttaaattatatctgaatatcctctggagcactcagatcttaaaatactttagaagagactgtaaagaactgccagtgattgtctttaaagaggcgtcatggcagtgctgtaattcttgcttagcaacacttatatctaagctttcttctctgagggaaaggccaggttctaggtcactccctcactttgttccagtctctgcccaaaggtcacctcttccctgactgccctttctatatgaggttcccaccgaacgcatctgggttgccctctatccctgtccaacatagtagtcactagccatatatgacaattaaaattaattaaatgacaaaataaaaaattcagtactttggtcataccagccacatttcaaaagctcartagccatgtgtggcaactgggcatattggcaacacagatacgtcatcgcagaaagttccaytgggcactgctagcctatgctcttgccttaactttttcaacactatgccatgccatgcacctattgatttgtttatgttccactagaatacatgctctggatcacagagttttttttttttkttttcccagaacatagctgaatcctcagtgcctaaagcagtgcctgacatagtacagtgctttgtaaatacttgccgagtgaatgaacaacaaatgaatgaatgaattttagtattattttgcagtttcaaatcaaaastattttgtctaatgtccctgggtgacctagtacacgttctgccacagtttttgagatgaaagaacgaaaattctgtgatcaaagagaacattttaaagataaaatgatattaaatatactagtcaaaattttatttcttttatcttttatattatgaagaataatgggtacgaaatttctgtttatcaattaacgtatcatcctgaatatgaacacagaaaatatcaattttctttgcattaagaagtcatgtaagtagaaggagaaaacaaagtacttattacatagctaactggacttacagtcacatctaatttaaagcaaatttgctccatgcaatggaatatactaaaagtaatattgtgcaattatagctacagacatgataggaaatcataatacattctaaaagtatatagaaaaatgtcagtttacttcaacttattttaaacaaaaattacccatgaaatgattgcagtacctaaaaagaatttgcaatctgaacaaaatataactagaagcacgactaccctatatctcctataaatacagattgaagctagttttgtgatttcagccaaagatgcagcttcagtaaccttgaaaaacattgtttcctttctattgggcctggctttgtcaggagatactcaggaggtgatggtgaaaggaggtacctggtggagccagacgagtckggtaaatcagctttaacaagcagccagatgatagatgtcagttgggtgtcatgcccaattctagttgctgacaattaggaattagattaaaataggagtgttttctccttcaccctccctttcttaaaagcagccattttctgagtagtgttagttcttagttctcagtggatttgcaaatgcagatcatgaggcacctctagcttgggcaggattggtgttattttgctatttcaagtaaaaaacatgatggttagtgtccttggataacctcatatactttcattgtttttcaaatcaggtccagtgaagggccaagttcttcataaatatcatggctaattttggaaacccatatgttcagttaaggtttctgaaactggaataaatatgaatggaggatttatcaacatttggatatttgcaatttcaattcttgattcttttttgaaaatctattctgggtctayatctgaaatgtttatctcctttggtgctagatccagagtacaatttttgaaaactttaaatcaagggtggaacaataaattcacttgctcttaagactttaggggttgttttagctgccaagagagcattgcctgtgtgctgcgaaaaatacgagagccacagaatggccaaattattgcttttactcaggcagagtgaagaaaatggccctgtgacagacatttccagtttcctgtacatagaaatggggaaacagttgtgaaaaaaaaaaaaaagccagctggggttcttgacacacagttcatgctaattttaaattgtactaatacttgactatatagtgagggatcctttgcaggatgatgatctgttgaagactcagcaggccactgtggggagagggagagaggctgtcagaaccttcccctccagaggccttttaatggatactgaattcagaattgacctcacagaatctgatcattactgatgcaagagcaaagtcaacatcatctgcaaagataatttctcatctattcatgagtacctgtgcttatcaccacatctggaaatctgactactcaaataagaatttctgtcgagagactgaacaagccaggcaccaggaatattttactctgtatgtacagatggacatcgatactggaatatttctgtctcactgatgcttagggaccatcttttgattttgatccgtgtcaagattctaaggcagtttaactaagacatgggttttcagtgtttttttgtttttgtttttgttttaatttctgtttctgtgagtgtaatttagggaggagtaccagcttgttttttataagttgtttcttacaatgattaacacataatcttttctgccttaaggtttataacaaatgtgaaactaagtttcacaggttaattccagcctaatcttttcatagatgatagcgtagcccagaagcaatatgctgtgacattttattttattttatttttgagacagagtcttgctttgttgcccaggctggagtgcagtggcatgatctcggctcactgcaacctccatctcccagattcaagtgattctcctgcctcagccacccaagtagctgggattacaggcatgcacaagcacgcccagctaatctttgtattttaacagagacggggttttgccacgttggccagactggtttcgaacgcctgacctcaagtgatccaccacctcagcctcccaaagtgctgggattacaggcgtgagccaccgtgtccagcctaccgtgacattttaaatttcaaaatgtaataaaatcacaagttatgccagaaagccaccgtacttctcattgaatatagtatctccttggtgttcatgtccttatgttcttatataactctgtgtgccagtgtttcaccaaatctatcaactcttttaaggcagagactacatttatttattttttaactttttgtttgaaataacaaaactttctgataacttcagacttagaaaaaagttgccccaaaatactacactgattttcatgtacccttgatacagcttccccagatgttaccatcttacataatcatagtacagtgaaggaaacagaaattgacgttgatacaatagcatcactaactaacctaaataacttatttcagtttgccgattgtcctactagtgtcctttttaaagtccaggatccaatctagaatcccatacaacacttacttgtcacgtcttgttagtctcatctagtccggaggagtctttctataattttcacgacttaatacttttgaagagtcccgaccagtgattttgtacaatgtccccagtttgggtttgtctgatgttttcttaggataagaattagcttatgcatttttgacaacaataccactgaagtgatgttgtgcccttcccaatgttttttgttgttgttgtttttgtttttgttttggagaaggggtctccatctgttgccctgcctggagtgcagtggcacaatctcagctcactgcaacctccgtctctcgggttcaagtgattctcckgcctcagcctcccgtgtagctgggaccacaggcacacaccaccacgcctggctaatttttgtatttttagtacagacagggttttgccatgttggccaggctggtcttgaactcctgacctcagatgatctgtctcccacctctgtctcccaaaaagctgggattacagatgtgagccaccgcacccggcccccagtgtattatatgagagggtacatgatgtcagtatgtctcattgctgttgatctaagttttggtcacttagataatgtggtgtctaccaggtttctccactgcaaagttactgttcttcccattagaattaataagtactttgtggggagatgctttaagactctgcaaacatcctgtttctcatcatacttttgcccattaattttagatactattgatgattcttacctgtaacagttattagtgtttgctaaatgctgatatattttatttccatcattccttctatattattgtaattctactgtaaggaagagctgttctttcttctgctatttattgatttattatgttaatgtggatatataattagttactataatttttttctcaaaatatctcagatttggccattggaagccccttcagacaggctcctgtctccttttgacatrtcctcatyatcttttaaatgcatgttgtaactctggcatcacaagatgtgtctggcttattttgctccagccctagaatcagtaacttctccaaagaccctagttctttttactgtagactggtatttagaaacaaaatctgggtgctggatatgctcattgctactggtatatcattgcttctaggccctctcagcttacagtgctaggaaataatgtgtctgtatatccagacacatgtttctctctccctctctctccatatctatatgcctatgactatctacctattaaaaacaataagtttatctacttattaatacttccacttacaattcaataccactagtttccttttagatatctctttccttactcgtggctttttctccaacagttagaaacctggcattcattatctacaatatatttacttatttgctcaaccctagtatatatgtaaagaagtttcagaactgtgatttccataatctctatgagaaacaagtttaccaacaagactatatagcatccaggtgcagtcctttttgtctttagtcttaaggtatataataaaagtactggtttccaaaattaggttagatattttctttcttacctctttcatggtggctgttgttttttacttgtaatacagctaggttcttttgttactgttcgtgttccattttgggttcccccaacaccgagaggttggttttaattattctttattagggggatgtgaaacatgattattgttctcagagtcagaactctgtgaaaaggggccggtcgtggtggctcatgcctgtaatcccagcactctgggaggccaaggtggttgaatcacttgaggtcaggagtttgagaccagcctggccaacaaggtgaaaccccttctctactaaaaggacaaaaattagctgggcatggtgatgggcgtctgtaatcccagctacatgggaggctgaagtaggagaattgcttgaacccaggaggcagaggttgcagtgagccgagatcataccactgcattctatcctgggtggcaagctagactccatctcaaaargaaaaaagaaccatgtgaaaaggcatttcagaaaagtgtcattccacctcatcccttctgtcacgtttcagtctcccattcttcccatctaccccgtaagtgaccagtttagtttctacttttttcttctgtatttctttttgcacaaataaacaggcacatatatgttttcttatacagagatgatattcagtgtctttttttgtgtggtactgggcaatttaaatgctgtttggtaattttaactcttaaggatactgtttataattgatctgtccttaatgccaatgtattagaaagcacactaaatgattgttttcttttttgtaaaatatttgtgagattttttaaaaaatgaaggtgacatgaattttgatgggcttattaacactgaactatttcttgataagagttgtctaaaaaaatgagaacatatgccaggcgcggtggctyatgcctgtaatcccagaactttgggaggctgagacgggcggatcacaaggtcaggggatcgaaaccatcctggctaacaaggtgaaaccccgtctctactaaaaatacaaaaaaaaaattagccgggcgtgttggtgggcacctgtagtcccagctactcgggaggctgaggcaggagaatggcgtgaacccrggaggcggagcttgcagtgatccgagattgcaccactgccctccagcctgggcgacagagcgagactccgtctcaaaaaaaaaaaaaaaaaaaaaaaaaggagmacataaagcaagtaacaatgtttttcaagttttctttaaygcatyacatctttttttcacaagatattttaaaattttatttttccttattaagcgaattgaattatttcaagcatcagtgagagctgctagactgttatatttcgggggtcttgcrgrgtagcttttcttacacatataagcagaagaamacattttcccaagtcttaaaagwgggttatgatgcatttcaktgtgtactctttttcttcccatatactctgcaggcatttgggcagtccttctccatccaccggaaggttgctgaagatggagagactcgggaggaaacgcttctgcaggagtcagcatcgaaggaggcttactatctggggaagatcttggagatgcagaacgagctgaaacagagccgggctgtggtcactaatgtacaggcagaaaacgagaggctcaccgcagtcgtgcaggatctgaaggaggtaaataaacaaattccctatgagagatttgtgagagggagaaataagaaagttctctccatagcagagaggaataacacttttgttttaatcagaggagctgtattaagcacgaaactactaatactgagctagcaacttttcttttttagtgaaatgatagctagcttgttctgagatgagcttttctctcttttattgtttcttgaaaattaagttttgtatgtattgcggacttcggaattggccttactatttctgcaaaggtattttaaaaatacagtgaccttagcacttcctccctgcattagctggtttaatacaatgtggagaagaacggttggctgtaatgctctgtatctgcctgatttccagctgacagtggtgttggctcaggacactgctcatagggaatgacagcctaggcgagtgtcctgagaagtctttgagtctggtgatgcagatccccaaaggatttttctggttatagagaaggcagcaaattatggctggtatgaattaggtcagggagtctctcttgctctgtgagtgttgagcatccaccaaactcagtattccttgttagcttttccaaggcagcatcacctgccatatcattttcaaactggcagagtcatcctttagtggaggggtgatgttggaaacagagatagccaaaagtagcttcatccatcaaacccctgtaagaacatttttggaagctayattcaatcattcactccgtattttgatatgaaagctatagaagagacgcagacgtcctctaactcctacaccaatgcagtgatcattgacaggtccacaaccaagtgggctcactagttgagcattttagtgatagaaatatgtaggatgaaaatattcttcaatattgtaaagtataagacaagcaatccacatttgaaataagtgacatattacaaatagggcttcactattataagatataagttgtccagaatttattggaattttctagataatttacgtttacacatgtccatattacaatgaactaaatgaatactgacagcaaggtcacttatgagataaggtttacttatctcgttatctttggatatgcccaaatatagcaatatgacttgtgaagacagagaaaggatctaatgaagtggaagttagtgttgagtactaagaagaagaygagacagttttcaggataccaggacctcctcatttccctccaacgtgaacaactgttaaaaacagagctactctctggttccttctttctgagacagggtgtcactctattgcccaatctggagtgcagtggcacaatccagcatccattgcagaagtggacagagggtcatgtggagccaaagcccaccattctggattaaggaagtcaccaaacatttgcagggagcaacctcagcagccgtgagcagcagggtcatgtgcaagttggcagagaggatgtggcatgggcaacgtgaggaccgtgtgcacacgcatgcaggtggtttatggagaagaatgtgaccaatgagtcgagtattcttgatggccagttggatggatcctytgaaagctgcaatccccattgtgtgtagcagctgcagctgagccaagaacagccaaggttgaggatggggcagggaatccacagatgcttttctgtgtgagtcaacgtggtgatgattaatggagcatcctcacttacacagccacgcttgaaggcagttccaatgagtagatttatgatgcatggcagaagttaattaattaagcatgaagttacaagttaggaatgaatggaggcagcaaaagaaaaaaaatttgaggggcctttcattcagatcagttctcaaacttgaaggagcatctgaatcacctggagaactcatcagaccatgaacacggggccccctcgcagagattctgattcagtagatcgaggtaggacccaataatttgcatttctaacaagttcccaggtgatgtgggggctgctgctctggaaaccacatattaagaaccactaatttagattttttggcctgcccaaagctgaggaaggctcacaattgggacattgctataagcaccatgatctcctgaataaatcaattggttgtgattcttcaatttttatgcattttacatagtagatttgcagtaagagaataacttgttatatccacatttaggtatttttgatctaaaacagcttgaggcactttagcctatgaatgtgtttattcagatttgtcaggtaactaaaagaaaaaaaagatcttgtgtttctttgtcttctatgtgtgccaataatgtatttgttaatgttctttctgatgagtgagagctggtgatattactataaccctgagtttttgtttttgtttttaatccagcagatacattttattttgctgtacctaagagaattattattaacatttagagctaacataaaaggagaayaggaataaattctattttttggtgtattgatacacacttttaatggttggtattaagttgaaatctcagatttgatttccttttaggctcagttttattttttgtactataagcattaactgatgtacagtgattggaagagagatcatgtaacttagaacagttatgacatgatggaccatgagaaatatacaaggataaccaacccaaaatatagtaaatgatcagtttgacagatgctgtgtctctaagaacttaattaatgggataatttttctttactgaaaggactcatttcctgttttagtaggattgttggtcctggcaaaggtgtgtgtgcgtgcatatatgttgggtgcatcgtgaaagatttacccatgtgtgtgtgattacaatgtcaaattctcttccataaatagtagttacaggatagtatggtggaaaatggaaaaattgctgaattaggtattagaaaatcaatattctagtcagctctgctgaaagttttagtattaaattcatgatatttgtaaaatttatgttaagattatattgatatagagtacatacataaacataagcaattatcattaataatgttctgcatactccaaaaatatcattgacgatatgactcattatgtagatctatattcttagggtaaagaaacatgagataaatatctctgaatttatcacctcaaaaattctttctcttgtgatatgaatcaggcagtagaattacacatttttatttctgccttgactgttaagaagctctgcggctatgcttaagtataaaaaaactaacctagatttttttcatctaattctcacttttaaacgttttgattagccttattgtatatatgtttttaatggtaaactgctttaaataattttatatactatactacaaggctacagtaaccaaaacagcatggtactggtaccaaaacagagatatagatcaatggaacagaacagagcccttagaaataatgccacatatctacaactatctgatctttgacaaacctgagaaaaacaagcaatgggtaaaggattccctatttaataaatggtgctgggaaaactggctagccatatgtagaaagctgaaactggatcccttccttacaccttatacaaaaactaattcaagatggattaaagacttaaacgttagacctaaaaccataaaaaccctagaagaaaacctagccattaccattcaggacataggcatgggcaaggacttcatgtataaaacaccaaaagcaatggcaacaaaagacaamattgacaaatgggatctaattaaactaaagagcttctgcacagcaaaagaaactaccatcagagtgaacaggcaatctacaaaatgggagaaaattttygcaacctactcatctgacaaagggctgatatccagaatctgcaatgaactcaaacaaatttacaagaaaaaaaccaacaaccccgtcaaaaagtgggcgaaggacatgaacagacacttctcagaagaagacatttatgcagccaaaaaacacatgaaaaaatgctcaccatcactggccatcagagaaatgcaaatcaaaaccacaatgagataccatctcacaccaattagaatggcaatcattaaaaagtcaggaaacaacaggtgctggagaggatgtggagaaataggaacacttttacactgttggtgggactgtaaactagttcaacccttgtggaagtcagtgtggcgattcctcagggatctagaactagaaataccatttgacccagccatcccattactgggtatatacccaaaggattataaatcatgctgctataaagacacatgcacacgtatgtttattgcggcattactcacaatagcaaagacttggaaccaacccaaatgtccaacaatgatagactggattaagaaaatgtggcacatatacaccatggaatactatgcagccataaaaaatgatgagttcatgtcctttgtagggacatggatgaaattggaaatcatcattctccgtaaactattgcaagaacaaaaaaccaaacaccgcatattctcactcataggtgggaattgaacaatgagaacacatggacacaggaaggggaacatcacactctggggactgttgtggggtggggggagggggagggatatctttaggagatacacctaatgctaaatgacgagttaatgggtgcagcacaccagcatggcacatgtatacatatgtaactaacctgcacattgtgcacatgtgccctaaaactttaagtataataataataaaattaaaaattaaaaaatttaaaaaaaaatgtaaaatgcttccaacagtgcctgacatgtggcaaaacaaattaataaacgttatctgtatcacaaaaaataaaaaaataaataaataaataaataaaaataaataaaaataattttataggccgggcatggtggctcatgcctgtaatcccagccctttgggaggccgaggcggctggatcacaaggtcgtgagttcaagatcagcctggccaagatggtgaaatcccgtctctactaaaaatacaaaaaatttagctgggtgtggtggtgggtgcctgtccctagmtgcttgggagtttgaggcagagaattgcttgaacccgggaggcagaggttgcagtgagccaagattgcgccactgtactccagcctggygacagagcgagactctgtctcaaaaaataataatgataataataataattttataaaatacagggagtataaasaaaaactgatcacccaaattggagaaccaaattaatagttaatcttaacctaattaggagttaatcctacagggccaataataggcagagtgaagaaatctctgagttctcttgacccagcattatttttggtaagagcataaagaaagcagattgctataggatttaaatagatatttagtaaacaagtttgaatttcattttttctatcttcaacctgtaggtatamtatactagaagatagcctaaaatttgggtaatatttacttttatacttatttatactaaactaaactaaaatccacattaatgaaatcataaaataggataatgaaacttaatactacttaattctcccaattactagctaatgtctcaaatataagatatgttagaattaactgcaatatttacaaagtatacaaagcaattatgcagcattcctaaccagaattggtatatatgggataaaaagatgtcacataagataggccccttcaggtggaatgcagaagattggagttatcaaatgaattatcgaccttagtagagattaagcctataatttaaagtgaaaataacaacatttattgagtgccagacactgttctaaataccttacgtgccttaactgctgaatctttctaacaaccctactgaggcagttcctattatattatacccctattttactgatggggcacgtggatcaaagagaggtcagatcatttgtccagagcacatgggtaccaagtgacaggccatgatctgaactcaggaacactggctctgatgtgccattctttgccatgtcaccgtagctgccaagagcataggtttccctcttccgaaccctgcctcaagcaatgaaatttctagaaaagtatatgaagttttaatacgatagctgctatggtctgaatgtgccccttttaaattcatgcactgaaacttaatcatcaatgtgataatattaagaagtcgggcccttaggaggtgaatgagattagygagtttatatgagggctggagggagctagctaggccttttgrcccttttgtcctttccagcgtatgaggacaaggcattcatcctctccggaggacacagcaacaaggtgccatcttggacgcagagagcagctctcaccagacactgaacctgccagcaccttaatcttagatcttcagcctccagaactgtgatcaataaatttgtgtgtttttawaaattctaatgcaaggtttcttctataaggttattttgtctatgttgaaaatctatgttttagtttagtttacctttatcaatgatcttagctagatctgctggatcacttgctgcattcagttaaagacatcagcacttgctacttcaccttgcactttatgttatggagatggcttctttccttcgacctcataaactaacctctgctggtttcaaacttttcttttgcagcattctcacctctctcagccttcatagaattgaagagaggcatccgggtgtggtagctcacgcctgtaattccagcactttgggaggccaaggcaagtggaccatctgaggtcaagagttcgagaccaggctggccaacatggtgaaaccccgtctctactaaaaatacaaaaattagctgggcatggtggcgaatgcccgtagtcccagctactcgggaggctgaggcggagaatcgcttgaacgtgagaggcaggtgttgcagtgagccaagatcgcgccactgcactggagcctgagtaacagaaagagactttgtctcaawaaaaaaaaaaaaaaaaagaatcaaagagagcccttgctctggattaggctttggctggtttgatcttctatccagacctttcttcatgtcagaaatgagactgtttcgctttcttatcattcatgtgtcaatggagtagcacttttaattttcttcaagaacttttcctttgcattcacaatttggctaacttagctaacttaacttggctaatttggcatatgcttaatcatttcttcctttccttgaaagtacgattctttcacttggacactttgaggccactgtggggttactaattggcctaatttcaatattgtcttatgtcagggaataggaaggcccaaggagaaagagatggggaatggctggtcagtggagtagtcagaacacacatgtttatgggttaagtttgctgtcttatatggatgtggttcatgtcaatataacagataaaataataatgaaaaagcttgaaatattgcaagaattaccaaaatgtgacacagacacacaaagtgagcacatttaatgtatccagtaaaaaccaaagtgtttcttacagtctctgatgtttccttctgagtaattggtcattgggagctgtggttacacatagctgagtgaagcggacacttctgtgaaggcatggcttggctctwgctgggaagttttctgtttcctggcctgttcctgtctctcttctcctctccatacttgttgggaatggacctcatacctctctggaatgatgcagtgcaccaaacagtgaagaactgttgttgtttttaactgatttacataactgataataatatcatagctaacatttattgagctcaccatatgccaggtatgaagcttagcactttactacgttcattattgcatttaattctctcaacaaacttgcagcgcatatgcgattccacaggagagagctctatttcttttggttgaaaagttctttctaatacttgctgagctacagtaaacaaatatgtctattaatgccattgggaatttggaagcaaagtcttaacaaaatatagacaattcatttttgaataattgtgatttgattatgcttttggggaatatcagattaacaaagtgggtttgtttgtaaggattagtttgcaattcaggctcatagaatttttgtgtgtgtgtatacagttgtatcgattttattttattgagatggagtcttgctctgtcacccaggctggagtgcagtgttgcaatctcggctcactgcaacatccacctcccagattcaagcgattctcctgcctcagcctcctgagtagctaggattacaggtgtgcaccactacacttggctaaattttgtatttttaatagagacggggtttcactatgttggccaggctgatctcgaactcctgacctcaagtgatccactcactaaagtgttggggttacaagtgtgagtcactgcgcctggccagttccatgaattttaacttgtaaatagattcatatagccacagccactatcaggaggtagaccagtttcaccacttcagaaatctcccttggtcagtgctactctttgtagtcagagccactcccacctcagcctctgataaccaatgatctattctctattactatagttttgttttatttttttcttttcaggaatgtcatataagtggaataaaacagtatgtaaccttttgagattgggtccttcagcatgatgccttggagattcatataagttgttacatgtgtcaatagtttgttcctttttattgctgagtattattccactgtatagatacattgtggttgcattaatcagttcacctactgaagaacatgagttattttcagattttggtgattataactagagcttctataagcattcatgtacacttacgttttcgtgaagttttcatttttctagagtaaatacttaagagagtgggratactaggtcatatggtaagtgtatggttaagttttccagagcagctgtaccattttgctttcccactagcaatgtgtaaaagttcctgttgcccctattctttccagcccttggtatttgacagttctttttttctgtttttttttttttttttttwaracggagttttgctcttgtccaggctggagttcaatggcatgatctcagctcactgcaacctccaccttccgggttcaagkgattttcctgccttagcctcccgagtagctgggattacaggcacctacaaccacacccggctaattttttgtatttttagtagagacgaggtttcgccatgttgaccaggctggtctcaaactcctggcctcaggtgatccacccacctcggcctcccaaaatgctgagatttcaggcgtgagccaccacgcctggccttgacagtatttttaaaattttagcaactctaataggtgtgtagtgatatctcattatggttttaatttgcatttcactattgactaagaatattgaacatcttttcatgtgcttgtttgccttccatatattctctttggcatagtgtcttttcaagacttttgcccatttttaattgggtgtttcttttcctaggtaagtttttttgttttgttttgtttgtttgctttgagacggagtctcgctctgtcacccatgctggaatgtagtggcatgatctcggctcactgcagcctccacctcctgggttcaagcgattctcctgcctcagcctcctgagtagctgggactacaggcacatgccaccatgcctggctaatttttgtatttttagtagagacagggtttcaccatgttggtcagctggtctcaaactcctgacctcaggtgatccacctgtctcrgcctcccaaagtgcttggattacaggcgttagccatcacacctgacctatttttaaattttatattaatatattaactggatttttgtcaaatagagaattmtctttaaataaccatctcctcacttcacacttagtctgggaaaaaatgagagcaaatttctgtgcatccagggagcatatcaccaaccaggcatgaagcttaaagggagagtgcaggctgagtggccagcaggccatgggcatcccacagggccaggccaggacccaggcttcagcgacccttctcccagcccacctagtggccctcaaatccatgatgggacagacatgcattctcctgtcccagttgagaagccccttctagatggaagggagaggagaaaagccataggaaagaaatcccagaaacactagcaggtaagtacaggggcttcctccccagctgcggtgaccttgctcctgataacacccaacccctggagctcttcgccagtgtgcctggggctggagcctggcggggaagggaatgtgggctcacagtttctggatgttggcctcccacagcttggcacagaccaggggaaggcatgtgaggagggcctggggaggtcctcggggaagataacacagctcaggaggttgagtgtaaagtggctgccagaccaagggagctggatggactgtgaaggaggaggtggctggagagcctcctccatgtaaagctactagagcaaaaatagaacaaggggggacacccgtgccccagaggacagccctaaagatggtaacggggagcacggctgagcagcgccctggattctgagctagtgtggaaagctgggggccaggggcctctctcttccttcatcaccagttgctggtaactttacagtcagatttggaggaggaacaaggccctccatcgcctcccctagcctctgatgctgccccaaggggaggggtaagaatgggcaaagagggtgggaaacagggaggtgggagggagtctactgggtcttcttattttcagaggagggggctgtaatagtgtagtggcagaggctggttcctaggtatgtaggtgttgtgtgggttgcctggcactgacaactgcttctgtggctctggctttggctgccagagcagaggggccaatggggccactgaccagaggttccatgagcccagatagggcagtggcagggattgcaggcatcccatagctccatccatcatgggaggtcctggatagaactcagatggggactgtggattggggtagccaggagggcaaaggtacattccattggcaactggcagaggaaagacataggctctgttgggtatgtaagagtacccgtagcctccattgggggcctcgcccctggaggcttgaaatgccacctggagcattcattgtccaaactgctgtaaggttaacttgtatgaaccccagccctcccagccatctcccgcttcacccttcactgttcttttgaagtagttggcagcaaacaggctagttgatctcacagtccttcatcaggtgaaaaggcatcacgaaggcttcatggagttcttcttcttggacagaaagatgatcggtaaggggtaaggtagacgatgcctttcttggtccctttgaaggactctggcacattcttcttgtcattgaatgtaagttccacatggacgtaggacattaggatgttcttggtgttcttgatcactctgccaccctttgagtgattcttgttgagcacgatagtctcttggaaaggggtcctaagactctcgatgcagggccttgagttcgtttttgcataaaggagttggtttagattgaggttcctttttttggcatataaatgtccaattgtccatttgttgaaaagactactctttctccattgacttgcctttgcacttttgtcaaaatttattggccatgtttgtgtaggtctatttctggaatctgtattctgctctattgatctgtgtgtctatcctttcaccaatacacactgtcatgaagtcagagaggtaacaggaagccagatcatgtagggccttgtagaccattgaaaggatttaggcttttatcttgagtgaaatgaggagctacaggaaggtgctgggcaaaggaggaacctgactttattgaggcaaggataggaatgtgaggttactgcagtcatccagatatgcaaaaatggtggattggaccaggatgatgggtagaagtggtgaaaagtagtcatattctgaataatttttgagagtagccccaatgggattttctaatgggttgaatgtagagaatgagagataggcatgagaaaagaactctagtctgagggtttagcttgaccaacgtgaaaaatggagttatcaattgagatgggaaaaccttcaaatgaagcacattttaggaaggaaggtcagaagttcagtttcgaacatgttaagttttaaatttctattagaggtccacctgtggatgttgagtgaatagtgggtgataagggctaagagcttgggagagaggtctgggaatggaggtatacattttggatcctggcggggcacctgggatcacgcctgtaatcccagcactttgggaggctgaggcgagcggattacttgaggccaggagtttgagacgagcctggctaacatgacaaaaccccatctgtactaaaaatacaaaaaattagccgggcgtggtggtgcatgcctataatcccagccactcaggaggctgaagcaagagaattgcttgaacccgggaggtggaggttgcagtgagccgagattgtgccactgcactccagtcttggcgacagagcaagactctgtctcaaaacaaaaacaaaaacaaaaaatttttggatccatcagtagatagatgctatgtaaggccatggcattggtgaaatcaccaagggcagatatgtagagagaaaagggcaagcactgagccctgggtcactgcagcattgagaggtgggggacaaaaaaagaaactggtaaaggagactaaaaaatagtagtgaggtagaaagaaggtagacaatgctttctgagagccaaataagaaaatgatatccaggaagtaaatgatcaacagtgcggatgctgctaataagtcaaacaagacgaggacatatattgaccattgggtttacgaacaaggggtcattggtcacctcagtgagagaagtttccatagagtgttgggagaaaaaggctgaggatagtaagtttaagagagaataaaaggagaggaattgcaggcagagaatagaagcgtttttcatggagtctgtttgcaaataggaccaaagaaatgaggaggtagctaggggacgagatgggctcacgtgcaagttgttgggttttattcctttttaagatggaagaaataacatttgtgaatgctaatggccatgaccccataaagtgggaaattttaatgatgtaagaaggaaagagaagaaagcctagagcaattgatttccttgagtaaaggagaaarggatggaatctagtacaaaaatggagggattgcccttagaaggagctagaaaatttaatatatggtaacacttggaaaagcagaatatgtggatgtggatgccagcatatgggtagatagatgtgagtgaagcaagtcctcttcagtctgcttccatctcctcactgcggtggaagcaaggtcagcagctgagagggaaggtaggggaggggctgagatttgaagggacaaaagtgggcgataatcacctgggagagtgaaccgtaggagtcatgggagtgagtgcctgccataggagagaagatccctcaaaaagaggaattcagggctggatgcagtggctcctgcctgtaatcctagcaccttaggrggctgagatggaaggattgcttgagcccaggaggtcaggactgcagtgagccaaggtcacaccactgcactccagtctaggcaacagaatgagaccctgtctcaaataaataaataaataaataaataaataaataaataaataagyaarcaaataaataaataggaattcaagaattgagatcatctgtgtgggtattgagaatgccaggaattaagaccagaaattctagagatgatggcaatggcaatgagaaatgaaggggaatgagttggtgtttgctacrtaacagtaacagtgctggatagcggatgatagaatctgatgacatgaggtttaaagcacagaatttttagagaggagagaaggagaatgctctgaaagcagccacgtggagcaaaagcggcgtctgtctcacctcacyttccagccatgtggagcaaaaggggcatctgtctcaggcccagtggcatgggagtgaaatagcacttcagagagttgcaggggaaacagtgtccccaagggagagtcaggtttctgttaaaggaaggtgcattatgcacatctgtgaaattatcatgactgctgtcatcccatctgctcatagaaccagtgaatattgattggtcataaaatgcaagcattattttaaggagcatggacatttaatttctcttttaaggactggaaataattttttccatgatttggaaagtgatattatatttgtcaatgagaaataatgtaatagctttttaatagttcacaaaatgatgtcasttgctctytattcaaaaatatctttagcctttttgaggttattttggggagatgataaggacaggcatctccataatcccaaatatttgggagaaaacttcaaaaattaaagcgtatttaggctgagcatggtgactcatgcctgtaatcccagcactttgggaggtcaaggtgagtggatcacttaaacccaagagtttgagaccatcctgggcaacatggcgaaactctgtctctacaaaaaatacaaaaattagcagggcatggtggcrtgtgcctgtagtcccagatactcgggaggttgaggctgcagtgagctgtgatcataccactgcactccagcctgggtgacagaacaagaccctgccccctaccccctcctccaaaaaaagcatatttaaatattcccrgaatccaaatgttgaacatcatttggacacagcttcaaaatggtaccaattcttttaatttgtgactgctttatttatttatttatttatttatttatttatttwtttattattatactttaagttttagggtacatgtgcacattgtgcagattagttacatacgtatacatgtgccatgctggtgcgctgcacccactaactcatcatctagcattaggtatatcccccaatgctatccttcccccctccccccaccccacaacagtccccagagtggggttccccttcctgtgtccatgtgatctcattgttcaattcccacctatgagtgagaatatgcagtgtttgtttttttgttcttgtgatagtttactgagaatgatggtttccaatttcatccatgtccctacaaaggacatgaactcatcattttttatggctgcatagtattccatggtgtatgtgtgccacattttcttaatccagtctatcattgttggacatttgggttggttccaagtctttgctattgtgaataatgccgcaataaacatacgtgtgcatgtgtctttatagcagcctgatttatagtcctttgggtatatacccagtaatgggatggctgggtcaaatggtatttctagttctagatccctgaggaatcgccacactgacttccacaagggttgaactagtttacagtcccaccaacagtgtaaaagtgttcctatttctccacatcctctccagcacctgttgtttcctgactttttaatgaytgccattctaactggtgtgagatggtatctcactgtggttttgatttgcatttctctgatggccagtgatggtgagcattttttcatgtgttttttggctgcataaatgtcttcttctgagaagtgtctgttcatgtccttcacctactttttgatggggttgtttgtttttttcttgtaaatttgtttgagttcattgyagattctggatatcagccctttgtcagatgagtaggttgcraaaattttctcccattytgtaggttgcctgttcactctgatggtagtttcttttgctgtgcagaagctctttagtttaattagatcccatttgtcaatkttgtcttttgttgccattgcttttggtgttttatacatgaagtccttgcccatgcctatgtcctgaatggtaatggctaggttttcttctagggtttttatggttttaggtcaaacgtttaagtctttaatccatcttgaattgatttttgtataaggtgtaaggaagggatccagtttcagctttctacatatggctagccagttttcccagcaccatttattaaatagggaatcctttccccatgactgctttatttctgcattagacaataagaaggggccgaaacttctggcctgatatgacagtgacatcaacctcttgtgtagtagcctgtcattaagccagcgccaaatggaaaattaaatggaaaatggcagagagcattgcccaggacataatgtagaaatggcaactctggcactgacataggtttaaaaaaattatgttttaaaagtaatcttgctgggaggccaaggcgggcatatcacttgaggtcaagaattcgagaccagcctggccaatatggtgaaaccccatcgctactaaaaatacaaaagttatgttggcatggtggcgggcacatgtaaccccrgctactctggaggctgagacaagagaatcgcttgaacccaggaggaggaggttgcagtaagctgagattgtgccattgcactccagcctggatgacagagcaagagtctgtctttaaaaaaaaaaaaaaaaaaagtargcttacacatattccctttactgtttttcaaggtcattacatttttatctgttattgttcaccatttaaaaataagcagtggaaagcagcctactttttaaaatgcggaactcgtatggtgtacttagcatatatataaggatttctgtcctctctcttgcctccctccctcccgttcttcccccttcctcctccttccttccttccttccctccctccctcccctttcctatcttctgagtagggtcaaacaccagttctctacttctyggaccataagaataaagatctgtgcacaatccattttgtacatattgattcttggactaaaaatagctcaatttggtttcaaactttttctcccaccctaagttcaggttttgttccttgtgcagcctggtaggcgggcaagtaatgcatagtcagcattccatctgggatgcttactggacaattttaatcttttttttacgtcttgacctctatttccaaagagcatcccagttggcaggtctagcctgattaagattctgttcaggcatttaattctcctaagggaatttacagattaatctaaaaatcaaggataccagaatctactcaggacttaacttcttgaaggttataggaaacatatacttgagcaacctaatgaatgagcttagtgatatcgtaatgaatttttatatatacctcaaattacactttttaatgcatatccaacaaaaatatttttaaaaacaaatactgtagacctaactggattagctgtattagtagatccaaatttaactttcaatttgaattaagttagaacactatggatctcataaggcaggctatatattgattacctagttagccagcttccatatcaccacttgttcaggaacattaaaagtacttttttagaaatagttttctgatatatttttggtttcactaagacagctttttaaaaagcaaaattaggcagggcgtggtggctcacgcctgtaatcccagcactttgggaggccgaggcgggcagatcaccggaggtcgggggttcaagaccagcctgatcaacatggagaaaccccatctctactaaaaatacaaaattagccaggtgtggtggctcatgcctgtaatcccagctacttgggaagctgaggcaggaaatcacttgaacctgggaggcggaggttgtggggagccaagatcgcaccactgcgctttagcctgggcaacaagagcaaaactccgtctcaaaaaaaaaaaaagaaagaaagaaagaaagaaagaaaagcagaattataactaaacaccactttttttttctttctttttttttttttttttctggagttagagtctctcactctgttgcccaggctggagtgcagtggcacaattttggcttgctgcaacctccacctcctgagtggaggttactcaggcaatcctccwgcctcagcttcctgagtagctgggactacagccatgtgccatcacacctgaataatttttatattttttgtagagacaggatcaccccatgttgcccaggctggtctcaaactcttgggctcaagcagtctgcctgcctcagcctcccaaagtgctgggattacaggtgtgagccactgttgccagcctaaacatctcgtctgaggctatcacaatatatactattctccagcctacagtagattatagacatctagaatataaaaatttgtttcctgataggcttggcacacaatattcctacagtcctttgaaaacacacatattaacagagtgacaatatttacaggcagaattactcatgtgtcttattgtagcttacaggagagtgtgtctgtctaagaatggggtagaggttggtttgtaaaaacaggtgtcccacaagctttcttggatagttaactcagtagttagaatgaaggatgtaaaataacctgtcaggataacacctgctctcttgccctcaacaattaatgataatgaaactaggcctgaagaggaataaaaatcttgtatcatctttgaattagtcttttgttggtcgtgcgttccaatgaaatgatgtttcacaaccttttcttcattatcatctctgaaaagatcctttatggctatttttttttcctagttgccacaaaattaaacacaggcatactgtgtcttactgtgctttgctttcttgctcttggaagatattgtgggktttttttttacaaattgaaggtttgtggcacccctacattgagcaagtctactgggaccattttcttttcaacagcatatgctccttttatgactgtgtcacattttggtaattcttacagtatttcaaactttttcttttctttttttttttttttttagacagagtctcgatcagccacccaggctggagtgcagtggtgcgatcttggctcactgcaacctccgcctcccaggttcaagtgattctcctgcctcagcctcccaagtagctgggactataggtgcatgccaccacacccagctaatttttttgtatttttagtagagacagggtttcaccatgttggccagactggtctcgatctcttgacctcgtgatctgccctcggcctcccaaagtgctgggattacaggcgtgagccactgcgcctggcccaaactttttcattattgttatatctgttatggtgatctgtgatcactgtctttggtgttactattgtaattgtttggggatggcctgaactgcatccatataacacttaattgaggccaggtgtggtagttcacgcctgtaatcccagcactttgggaggctgaggtgggcagatcgtgaggtcaggaattcgagatcagcctggccaacatagtgaaaccccatctctactaaaaatacaaaaaaattagctgggtgtggtgacgcacacctgtagtcccagctacttgggaggctgaggcaggagaatcgcttgaactggggaggcggaggttgcagtgagccaagatcatgccactgcactctagcctcagtgatagagcaagactccatctcaaataataataataataaagacttaattgatacttaatccataaatgttgtatgtgttctgagtgctccacccaccagctatttcccatctttctcctcctcctcagacctccctattccatgagacacaacaatattgaaattaggccaactaatagccctacaatggcttctacatgttcaagagaaaggaggagttgcacatctctcactttaaatcaaaacatagaaatgattatgcttagtgaggaaggcatgttgaaagcctagataggtcaaaagctaggcctattgtgccaaacagccaaactgtgaatgcaaaggaaaagttcttgaaggaaatgaggagtgctattctgttgaacacacaaatgataagaaagtgaaacagcctcattgccgatatgcagaaaatttgagtggttctagatagaagatcaaaccagccataacattcctttaagccaaagtctaattcttttttttttttttttttttttttcagagtcttgctctgtygcccaggctggagtgcattggcacaatctcggctcactgcaagctctgcctcctgggttcacgccattctcctgcctcagcctcccatgtagctgggactactggtgcccgccaccacacccggctaatttttttgtatttttaatagagacagggtttcaccatgttagccaggatggtctcgatctgatctcctgaccttgtgatctgcccgcctcggcctcccaaagtgctgggattacaggtgtgagccactgtgcttggccaccaaaccctaattcagagcaaggccctaactcccttcaattcactgaaggctgagaaaggtgaggaacttgcagaaggaaagcttgaagccaatgggttggttcatgaggtttaaggaaagacaccatcttcataacataaaagggcaagtaaacagcaagtgctgatagagaagctgcagtaagttatccagaagatctagctgagatcattggtaaagctggcttcaccaaataacaaatcttcaaatgtagatgaaacgactttgtattggaagaagatgccttcaggctaggactttcatagctggagaggagaagtcaatgcttcaaagtttcaagggacaggcttttgtcccttgggctcttgttaggggctaatacagcttgtgactttgagttgaaggcaatgctcattgaacattctaaaaatcctagggcccttaagaatgatactaaatgtactctacttgtactctattaatgaaacaacaaagtctgaatgacagcacgtctgtttatagagtggtttatcaaacgtttaaagcctgctgttgagayctaccactcagaaaaaaaggttcctttcaaaatattactgctcattgacagtgtacctggtcacccaagagctctgaaagtataaggagatgactgttgttttcatacctgctaacacaacatccactgggcagccaatggatccaggagtcattttgactttcaagtcttattatataagaaatacattttataaagatatagctgctgtagatagtgattcctctgatggatctgggcaaagtctattgaaaaccttctggaaaggattcacmattctagatactgttgggaggaggtcaaattatcaacatgaacaggagtttcgaagaagttgattccaaacctcatggtgactttgagggctttaagacttcagtagagcaggctgggcatggtggcctataattccagccctttggaaggctgaagmgggtggatcacaagcatagagttcaagaccagcctgggcaacacagtgagacccccatctcctaaaaaggatttttttttaagacttcagtagaggaagtactcgtaaatatggtggaaatagcaagagaactagcattaagaatgaagcttaaagatgtgactgaattgctgtaatctcatgataaaacttgaatggatgaggagttgcttcttatggatgagcaaaggaaatgatttcttgggagggaatctattcctggagaagacactgtgaaagttgtcgaaatgacaccataggatttagaatatcccataaacttagctgataaagcaggggcaggctttgagaggatcgactgcaattttgaaagaagttgtaccrtgagtaaaatgygatcaaacagcattgcatgcttcagagaaatctttcttcacaaaaggaacaattggtgcagcaaaattaattttcttattttaagaaattgtcagccgggtgtggtggctcacgcctgtaatcccagcactttgggaggccaaggtgggcagatcacctaaggtcaggagtttaagaccagcctggctaacatgctgaaaccccatttctactaaaaatacaaaaaattagccgggcatggtggcacgcctgtaatcccagctacttgggaggctgaggcaggagaatcgattgaacccgggaggtggaggttgcagtgagccgagatcgcgccattgcactccagcttgggcaacaagagcaaaactctgtctcaaaaaaaaaaaaaaaaaaaaggctgggcgcagtggctcacgcctgtaatcccagcactttgggaggccgaggcaggtggatcatgaggtcaggagatcaagaccgtgctggctaacatggcgaaaccccgtctctactaaaaatacaaaaaaattagctgggcgtggtggcaggtgcctgtagtcccagctacttgggaggctgaggcaggagaatggcgtgaacctggcaggcggaggttgcagtgagtcaagattgcaccactgcactgtagcctgggtgacagagtcagactccgtctcaaaaaaaaaaaaaaaaaaagaaaagaaaggaaattgttggccgggcgctgtggcttacgcctgtaatcccagcactttgggaggccgaggcaggcggatcatctgaggtcaggagtttgagaccagcctgatcaacatggagaaaccctgtctctactaaaaatacaaaatgagccgggcgtggtggcgcatgtttgtaatcccagctactcgagaggctgaggcaggagaatcacttgaacccaggaggcagaggttgcagtgagccgagagcgcaccattgcactccagtgcagtggagtgcagtggtgcgatctcggctcacgatcgttagcgttttttaacactcaagtgtttttggttttgttttttgagttggagttttgctcttgttgcccagcctggagtgcaacaagagctggcatgatctcagctcactgcaacctctacctcctgggttcaagtgattctcctgcctcagcctcccaagcagctgggattacaggcatgcaccaccacacccggctaattttgtatttttagtagagatggggtttcaccatgttggtcaggctggtctcaaactcccaacctcaagtgatctgcccgcctcatcctcccaaagtgctgggattacaggcatgagccaccatgcctggcccactcaagcattttttaattaaggtatgtattttttagatatggtattgaacacttaagagactacagtatagtgtaaacataacttttgtatgcactagaaaataaaaatttcatgtgactcacttttttgagatatttgctttattgcagtggtctgaaaccaaacctgtaatatctccaagatatgcctgtactgaagagtaagattttgtcagttagagtttaatcttggaaagactacaaaccactgtaataacctaagcattatttgattccccaaggaccaattttcacccctttgggggccatattaattttttatggctgctataccaaagtactatgaattttatggctgaaaacagcacgaacttattcccttgtagttctagaggccggaaatgcagttcactgggggtaatgtcaaggtgtagggccatacccccaggaaggctctggggaagcgtacatttcctcttccagcttccatctttttctggcttccagacttgcattctgtgtgttcactgactcatgtctgcttcctccatctttcaaagccagcagccgtgtagcatcttgtttcaatgtcacgttgcctttttcttctgtcaagtctccctctgcctgcctctcatgaggacagtgtgattacacttagggtctaccttgctaattccggataatctctgcatctcaaaatccttaatttaatcgtatctgcaaagcttgtgttaccatataaggtaagagtcacaggttcccaggattaggaactggatatctttggggaccaatactcagccacagaggtgataccactccccaccccttaaaaatgcatgttctacaccagtaaggaagaaagaaaataagaaagaagagtaaaagataataaatatgtaactttggctacaaatgaattctttattatatctcattctatttggggcacttgctattagaacaaagagagaagatatatttaaaattaataggattcagaagagtagagttgatgatgttcacctcattgcgatgtactcacccattcatttattttgcattacccttcctgcctggggccagtcagcagaggagggcagtgagtcactccaaggtcagacagtattattaccctcttattgtgatgggcaaatccaccattaagcttcagattgagagaaacaccattgagttggcaaatgctttcgatgtgtacgtgcagaaagtcatatgtatctacaattttccagacagyggcaaagagaaatggaaactctgtgctgtattttaattggctgcaaaatgtttccttcagaaattaccattccattaagcacctactctgtgcaaacgctttgcaaacactgctgggaatagctgcatgtataagggcatgcctacctttattagactgttcaggggaataaaatgaagttacaatttattctaatactagaatgcagttctctccccatggactgcacctttcaggatagtggcctgaatcagagcagaaaacacctgctggatatcctccaagtacacagtctgattagtgccctctgggaaacatggaggcagatactacttggctctccagcctaagggaagtattattaattaaaaacttaaagccaggttcttctctgtgtatggttatgcatgtcctagatggccttgaaattgatctgttctccattagcaatctgtgaattgtactcctgtctgaaattgagtagaggtcagagctatgaaggttgaattcaacaagaatttttatgaagtataactagagttagtgctctgctctaactgcttttggagacagactttccccagtgtatcccatcaaatcacagactaaaaacagtctatttccccttattcttggccagataggacctaggcacctgaatttttttttaaactagatttccaggaaattttattgaaggctaacagcatagcatttcatgttggataaagaagatgcacaagacgggacatggtaagacacacctgtaatcctaccactttggaaggatgaggcaggtggatcacttgagctcaggagttcaagaccagcctgggcaacatggtaagaccctgtctctccaaaacaaacaaacaaacaaacaaaaaaacaaaaattagctgggcatgatggtgtgcacctttagtctcagctactcgggaggctgaagtgggatgatcacctgagcccagggaggtcaaggctgcaatgagccatgattccaycactgcgctccagcctaggatacagagtgagaccctgtctcaaaaaaaaaaaaaaaaaaaaaaaaggccatatgcagtggctcatgtctgtaatcccagcactttgggaggccaaggcaggtggatcgcttgaggtcaggagttcgagaccagcctggtcaacattgtgaaaccagtctctactaaaatacaaaacaaattagctgggcatggtggcaggcacctgtagtcccagctactagggaggccaaggcaggagaattgcctgaccccaggaggcggacgttgcagtgagctgagatcgtgccactgcactttagcctggccgacagagcgagactctgtcttaaaagaaaaaaaaaaaattcacaaaagaaaaattgtattaagtacaatttaatataatttcttacaagtttattacctaaaactttgcaaataattgaagttagaagctttggattttgtttttagagcttaatccttttctgtaagtggaaatcctttccactggtttattttccttttgattttattttactttgacaccctaaaggtttagtgttcctgtttttaaatctactgatcgtttcttatgagattccttagagtgccctttaagtatgcacagattttgcaaatgcattcattttcttatttgccagggtttaacactggctatgcacatgttagctgaataaccttaggcaagtaaattatcctctctgggcctcgatcttgttagctattaagtgggaataatgacaattcctaactcaagggtstgttgtgaggattaaatgagtccttacatgtgacatacttgaaatagtacctggtgcagagttagggctgggtgagtgttagctattrtattattatttcattgctgtttgcatatatttttaaaatgtatttaggattttctttttttttttgagacagggtctcactctttgcccaggccggagtgcagtggtacgatcttggctcactgcaacctccacctcccaggctcaagagatcctcccatctcagcctcccaagtagctaggattacaggcacgccccaccatgcctggctaatttttttttttttttttttttgtatttttggtagagacagggttttgccatgttgcccaggcttgtcccaaactcctgagctcaagcggtctgcctgctttggcctcccaaagtgctaggattacaggcatgagcaactgcgtctggccagggttatttcttagggatagcattccagaaatataattaaaatttattgatccagaaatataattaaaaataattgatcaaatggtagaagactttttaaatttatatttcatcaattttacacatttgttaggttttaatgtttctactacttgtgtgtgccaaaaaattattgattttcttaatcgttttctatgagtagaaatcctttccactggtttgttattttccttttgattttattttacttttgacaccctgaaggtttagtgttcctgtttttaaatstactgattgtttcttaggagattccttagagtgccctttaagcagagaatatctttccctctccttcctcttcccttcactcttctcaaaactataaaaatataatactcatttctacctgttttygtggcttttatactttcratgtgttcatctacatgagatttagtttgatgtgtggaacagcaagagagtttaaattaaaaatcttcccctaaatggctaaatgtcccagtgccatttacagtgtggtacccctcctgtaataagaatattacattcttatccgtattaattatttcttattcaaacttaccagtggcatttaagaaatcattagttcagttgtttataggtaagaagactcattctttatctgctatttcaaaattaaaatcattgtctttcatagatattttctgaaatgaaatatggaaaacaattatttttacaatgagacttggaaaaaaatcaatactaagtttcttttgtatacaagatagccaataatacctaggcctaaaacgttccaatctagttttttgtctgctaataggtgctcagtatgacggagcttttcttgaggaccatttgaccctgtgtctctctttgcctttccccttatgaaaataagctgacccctacatccaatcaaatcatcatagcaaggttttcatcattttttatggaatgtcagccttgccacctgcttgcctggtacccaatacatataatctctcttcaggctgcaacacacagcacttgaggcaggctgtcattaattggagttacctccaattgcctacttcttattctattcctatcaaaaacccagctgacaggtacacaaggggcatagcccaaattacatgtaatccrtaaatctctccattttttcttaagtcttagttttctcttgatataggattttttttttttttttttgagatggagtctcactctgtcgccaggctggagtgcagtggcacgatctcggctcactgcaacctccacctcctgggttcaagcgattctcctgcctcagcctcctgagtagctgggactacaggcacgtgccaccatgcccagctaatttttgtatttttagtagaaatggggtttcaccatgttggccagtatgatctcaatttcttaatctcgtgatctgcctgccttggcctcccaaagtgctgggattacaggtgtgagccaccatgcccggccgacataggctattttttaaaatgcaagctcttctgaaccatataatatgatgttttaaaatatagactctgaagacaaagacctgggctcagaatcaggccccaccacttattttcaatggaatcttgtctgaatcttgtaatctttccaagcctcagttttttcatctgtataatagggataaaaataatagtaaacaaataaatgtatttcttttgaatatctagtagtattttaaaaatcagataactagaattatataactctatgtgctttattttttacttgtttgctgggaatcaaagagcttagttttgttttttgttttttttttttttgagacggagtctcgctctgtcccccaggctggagtgcagtggygcgatctcagctcactgcaagctccccctcccaggttcacgccattctcaaagagcttagtttaagctcaattcargtgactatttgaggcctggtcaggatatctgctgttatttggaacacaagctgtttgcccaggactaagatcaagtgattttcctaaagcaaacagtgtattgaatgtaatccaaatcatcagcaggaacaaaggaggccatatagcttagcaattaaggcatgggatctgaagtcagagagacttggatttgaatcatggccctgacaagttacgtgcctctctctgcctgagtttcttcatctgttagatgagcataatattgcaatatagtgttactttgagaattaaatgaggtaatgcaaagctcttagagtagttactaggataagtgtccaattaaccatagtttaagaaaaaggataagctgggcacggtggctcatgcctgtaatcccacactttgggaggctgaggtgggcggattgtctgaggtcaggagttcgagaccagtctggccaacatagtgaaaccccttctctactaaaaatacaaaaattagccrggtgtggtggcgcacacctgtagtcccagctacttgggaggctgagatgggagaatcgcttgaacccaggaggcagaggttgcagtgagccgagatcgtgtcactgcactacagcctgggtgatagaatgatactctgtctcaaaaaaaaaaaaaaaaaaaaaaaaaaggaaaaaggatgaaatcacaacttggagcaaaaaaacccaaaggcatatttaaagatttgygtattgggttaaaacaagttttaacatctggaaagaaaaagcatccatcaacttttcttatcaagaaatatgaattatagccaggtccagtggtgtgtgcctgaagtcccasctgcttgggaggctgaggcgggaggatcacttgtgactgggagtttgaraacagcctggggaacatagtgagaacccatcaggaaaaaaaaaaaaaaaaaaargttgattaaaaaaagaaaaacaaaagaggccaggcacggtggctcacacttgtaatcccagcattttgggtggccaaggtgggaggatcgcttgaggccagtgattaaagaccagcctggacaacatagtaggactccatctctataaaaattttaaaaattagccagacatggtgccgtgtgcctatagtctcaactactttggaggctaaggcaggaggaatgcttgagcctggggggttgaggctgcagtgagctgtgatggtgtcratgaactctatcctgcagtacagagtgagaccttgtctcaaaaaaaatcatctttacagttatttkattatttgcagattttcagtgtttattgtttttactttccttgccccactattctgcattcatcaaatattcattgaacactgtctttttgccagagactgctgtaggcacaagagatacagcaaaaaacaagacaaaacccttgctctcatgaaacttacagtcaagtgtgtgagatggacataaacatagtactgtgctgtcatgttgtaaaatgggacctctcattgagaagctgggttggtttgggggtggggagtatgacatcaakagttctgttttgatcatgtttagttcaagatgcctgttatggtcaggcaccgtggctcacacctgtaatctagaactttgggagactgaggtgggtggatcccttgagttcaggagtttgagaccagcctgggcaacacagcaaaaccttgtttctacmaaaaatacaaaaattagcccggtatggtggtgtgtgcctgtagtcccagctactagggaggctgaggtgggaggatcacttgagtcatggtaacagactcgctctgggtttcgctctggatgacagagcgagaccctgtatcaaaaaaaaaaaaaaaatgcctattagaccttcaagtggtgaagacaagtaggtaattggatacacaagtctgggctcagggtagaggctgggctagagaaagaaatttgggagtcatcagtgaatagrtgacattttaagccatgggcttggaggagataacctaaggaatgacgagaatacatctgaagatccagcctcagacactctggtgtacagaagcaggtagagaaaaggagaaaccattaaagacctctgttgggccgggcatggtggctcacacctgtaatcccagcactttgggaggccgaggtgggcagatcactcgaggtcaggagttcaagaccagcctggacaatatggagaaaccctgtctctgctaaaaatacaaaaattagctgggtgtggtggtgcacactcacttcactctagccagtagtcccagctactcaggaggctgaggcaggaaaattggttgaactgtgaggcagaggttgcagtgagccgagattgcaccactgcacaccagcctgggcaacagagcaagactgtctcaaaaaaaaagaagactgagtgtgatggctcacgcctgtaatcccagcactttgggaggccaaggcaggcggatcacctgaggtcaggagttcaagaccagcctgaccaacatagtgaaaccccgtctctactaaaaatacaaaaattagccacgtggtggtgcgcacctgtaatcccaactattcgggaggctgaggcaggagaattgcttgaacctgggaggtggaggttgcagtgagccgagatcgcaccactgcactccagcctgagtgacagagcgagactccatcaaacaaacaaacaaamaaaaaaaacaaaaacccaagaagacctctgtctcctagagcagtcacctagaatcctagagaaaaatgtctttccaaaaggaagaaatgcagaactgtgtgagtaaaatgaagctaagaattaattactggrtttggcaagatggaggttgctgatgacttggcaggagagtttccctgaggtgataggaaccaaggtctgatgagagtaggctgaagagcaaatgtggagaaacagagatggcaagaatcaacagttcatrtcaggattttgctgtgaaaggcagcagagggatggggtaccattattttcattttgttttgttgttggtttctgctgcagtggtagtttatgttgagatgtatattttaaactgatgatccttaaagaaggagaaattgatgaaggagagaggtgggagggataattgcaaaaatgaagtccttgagcagtgagatctgcttccttattatgcatatagatgaaacattaaaatgtaaaacagactcttgtgctgattttaagaactctaagttagaagagggtggggagaactgggaagctggggagcccaagatgcaggattttggctctttagctcagctaggttcaggttcttgtctcacaaccaggaggaattaggcacgtggacaccagagggtgagtagagtagaatttattaagcaaaaggaaagctctcagcaaagaggggggtctggaaaagcaggttgttggctgcccccttcacagttgaatactgtgcttaaggcacaaattcctggcggctccaccccatccttccagtgcgcatgtgggcccttagggtgagccactccatattgatttacttcccttactgcacatgtgttaaggaatggaattttccactgcgggcatgtttaggcaagccccctgtgcaagttcccacatctgcacaaaatatctggtgtaagcatttgtggggcgggttggaggttctccagggacccttcccttactgtctgcctaaagcaagctggctaacttcttacacctgtgtattatacagcaccagtctttagggaaaggaacttcaggtgggtagggtagastatagcaatagctggcaagaaaaaaaagatttgaagaaacaaactctgtggtgccctagggagcagatgtgggatggaaaagtgaggctgggccttaaatcacaagaagcccaaggtgtacagggatctctttacaacagaacgtgttcttatatatgagttatttgaaatagcttaattataccactatactgtcattaataatggataaatgtacttcaaagtaatttattagtttgtctgtgaatatgtctttccttgtctcttttccccctyacctagaatgtaaacaagagagaagagaactccagatctgattttcatggaggaaggtgatacagatcattatggctgtaaggggaggattcttgtgtttcccaggtgtcctgaaaccattcacatggagcctaagttaaaatgctctgggttcgggagtgtcttcctggagatcactaagggcttcaggactccttgagatggagttttcttttctctctctctcttttttttttttagtattttaaaatgtatttcgttaattagcagcagtatgccaaagttgttccattattatattttgttcattcttttgtacaagtgtcttccaatgtgatttgataatgccaacaatttgcaagtgattttattgcagcatgactttggttcccaggaatgctgaagcacaggtcctagaacagaggcttgaaaaggaaataaaagggatttgatcataaatgcttctggggttggcataccagatcattttgagctcaaataggagacaaaagaaaggatgttgggaaagctgtatggtggagaggctgaactgttggaatgaaaagacaagaagcatattattatgttaattccagcaccctagatctgcaatgctgaaaggactgccaaaactaaagcttgtcctacaccacgttcatcacaaagaaattctgtttagacgttgagttaaactttctcaactgtattcagtacaggattaagtggttgagatgggccattctgcagttacactgtttccgttccartctgggtctcctcatgtattagctgtgtggaccttgggcaggtaactcctttgtgcctcaaagaaatggagatgacgataatacctacctcagtggggttattgtgaggataaaatgcgattaatagaaaataattagaatggtgcctgggatacatactgctcattaaacattgtatatttttattattagtgcactgtgctataataggatggctatctagaaaacatcatgcaatttgtaatgcacatttatcatccagttaattgaaagaggtagtgatgggacagtggtggcagacattgaatgctcagggatgaaaaatgagacaggttttatcttgttttgttttatttttgcctctcattaggtatccacctacttttcaaaattgtgttattttaatctttattrcatacagacatattctcagtaaattgaggccaccatatggaagtgtaaggatgaagccaggcgcagtggctcatgcctgtaatcctagcactttgggaggctgaggtgggcggatcatttgagcctacgagttcaagaccagcctagacaacatggataaatcctgtctctacaaaaaaaatacaaaaattagccagatgtggtggcatgtgcctatagtcccagctacttgggaggctaaggtgggaggattgcctgagcccaaggaggtcgaggctgcggtgagctgtgatcataccactcacttcactctagccagggtgacacagtgagaccctgtatcaaaaaaaagaagaagtataaggatgaaatcataagcttaggtcctagttcttttgagtgagttagaacctatataaaattttctccttttggaattttatttttctaatgtttacctcattattttctgactataatagaaaattatccttaaagtttgccattacaaagggaattgtacttctttaaaatgccaattaaaaatatcttcttgttgttcttatatatatttttaagttatatatgcatatgttaaaatatttaagtgaaataggaatgacataaaaataaaatcttcctcctcactacctcaacctccagtcccatgctatagaagtaaatacttaaattagtttgctgtaacaaattaccacaaactttgtggcttaaagcaacacgaatccatctcatagttgtgtagctcagcattctgaaatgcgtctcactgggtgaaaaattaaggcatcagcaggactggtttcttcctggaggctctagggaagaatccttttccttgcccttctcacgttctagaccccactattaacactcatatattgtttcagaaatgtttaatgctccttgatttttatcacctaattgtatattttctagaactctccattcttttatatacagctacatactgttctactatatggatgcaccagatgttatgtgtccagctccctgtgttaatggagtcttggtttattttcaagtttttattttcataaattgcatcataaataatatctttatactttcatatttatgcattttgacaaacagatccatgggataagttgttcttggtgtagtttccaggtaaagcaggatgtacatttacacttttgatacttctttttaaattgccttctcaaaagacatctattatctttccctccagtgatgagtaagagttcatatttccacacggttttggggcgctcgggagtttgttttttttacaaaacttttaaaactttaccactatatatataatatatttataataytatttataatatatatatttaaatatcatatatttataatatatatttataataaatattatatattatatatttataatawatatttataaatattatatttataataaatattmtatattatatatttataataaatattatatattmtatattayatattatatatttataataaatattatataatatatactatatattwtatatatattatatatcttgtatatattatatatataacttctctttttacttcgtttcacttgagttataaatttgccatgtttggaggttttcgatggtcctagcraaccagtttccctagaagcaacttcccttcagtccgattcacatcaaagatgtgacttcaataccatctgatgttcaagctatttattttagcagtggtcttacaagtcggatagtgggagcaggtgggtggcatgggccagattcaatcagaggtcagatgactgcctgtccaggagggtctccatctggagactattctcagagtttgggagattcttcccatttcttctacctgcatttagttcagtcaattatcaggcgtttctttcataagaggaggttaagctagtcttataagggtaagctttgttaaaggtttacgagatttgcatccgtgatgaggtggccttatgtcctggaaatccctgggccagcttggaaatccccaggccaggtggcctcacgctgctaagtggcacatagtgtcagtcctgtgagagcttgttaatgccttatagctatcattaatcttgtagtcatgatatgtctcctataggatgctacacagttggttttagcattttactatcgttttgttgttgattacttttgttttctttcgttttttgtttctgtttttgagacagggtcttactctgtcatcccggctggagtgcagtggcatgatcatggctcattgcaacctctgcctcccgggttcatatggaaggcagaggattctcccacctcagcctcctgagtagctgggactacaggtgcacaccaccgcacccaggtaatttttgcattttttgtagagacygggttttgccatgttgcccaggctggtcttgaactcctgggctcaagcagtcggcccgccttggcctcccaaagtgttgggattacaggtgtgagtcatcgtgcccagccagcatcttactatgtttattagccatttggattcctttttctttgaattgctgcttgttaatatattggcccttttttctgttacattattaataatgccaggaattatgctagttgctaygcaagatgcagacttgaggaaaacctggtcccagctttcaaaatgcttactttccaaatctgactcatcgtttgactttaatgccccactggacttctctaacagcattttccattttccctttcaaaaggactcaaaatatacaaatttaatttgatgataagagctcaagaaaggccgtggattctttttttttttatttttatagtaaaagtgatcagactgtttcctcttttaagaagaaaaagaaagcagaggtcaatattaagcttccaattaatgcttattcatcacaaatagtaagtaaataatgacagaaataattccttagtcactctctagcacacttctkttttatttttaacatttttcactatgtgagatttcctagatttgttttattttctgtttccctctaactgcaatacaagctcttgtggactggaaccacacctgtcatattcatgctgtatctcacctgtcatattcactgccaaatcccacctgccataatcactgccgtatcycacctgtcatawtcactgccgtatcccacctgccataatcactgccgtatcccacctgycataatcactgccgtatcccacctgtcataatcactgctgtatcccacctgtcataatcactgccgtatcccacctgtcataatcactgccgtatcccacctgccataatcactgctgtatcccacctgtcatatttactgctgtatcccacctgtcataatcactgccgtatcccacctgccacattcattgcggtatcccacctgccataatcactgcccatatcccacctgccgtattcactgccgaatcccacctgccataatcactgccatattccacgtcatattcactgccatatcccacctgccatattcactgccgtatcccacctgccataatcactgcccatatcccacctgccgtattcactgccgaatcccacctgccataatcactgccatattccacatgtcatattcactgccatatcccacytgccatattcactgccgtatcccacctgccataatcactgcccatattcccacctgccatattcactggcagatcccacctgccataatcactgccgtatcccacctgtcatattcactgccataccccacctaccatattcactgctgtatcccaagcttccagagtaggctctagcatttgtaggtgctcagtgaatatttgctgaattagcaaaatagaaaatttaaatctcttaacaggtaccacgttttgacataatcacttgtaacatctatttagaaatccataggcagcacaagcacataaataaaaacctgaccttccccaagatctttcctcctctgttcagcatgctgtgtcaagagcagcacattgtgtggtcactgtctcattcaattgggacagtcgcatcatctgccccttgctgaatcgagcctttgaattagatgaaggaaatttgggccaagtcttctggaatttagtgactactattatctagtttccctctggtgcaattagaaatgagcaatgaaccaatatataaccttgcttaaaaagcaatttcctttactattctccttgtttaattagtctgttttgttctccctgagctcgagaggcattttttctcccaaagcagaagcattaagtaagatgcattcagtgttttcatgagattcattcattcttcttggacaagatcttggccactgtattagtctgcttgggctgccataacaaaatatcacagaccaggtggcccaaacaacagaaattgatttctcacagtyctggagtctgagaggtctaagatcraggtstctgctgatttggttcctgctgagggccctcttcctgcttgtgacagccaccttcttgctgcatcctcacgtgacttttcctctgtgcttgcatggagagaaagagacaacaagacagattcgctgatgtctcttcatataaaggcactgattccatcaggccactgatcccatcatcccccagcctcatagcctcatccaatcccatttamttcccaaaggccctatctccaattaccatcacattgggaactggggcttcaacataggagtttgggggaactcaaacattcagttcataacagccaccatgtgccagtcatctggacagaggttgaaaaagccctatccatgccaaaatcttacctcttaaggtagtagaggcatactgctaatgtgaacctttaaaaatgctcatttattctacagatattccttgtttatgccatattactcactggcttaaaaatcttctaatgatgaggcatggaacttggagaaaccacccaaagtttctaccatgttctgcaaggctgtgatcaggcacctgcttacctctcacactgctccagccacactggcctgcgtgctgctgctttctcccttagggcctttgctctggctgttcattctccttgtggtgctttgccccagatagctggctcattctcatcattcaggtctcacttaagtgtcatctttcataggacatccctgatacccaatcagaattactcccttggccagctggcctgtgccagatgctttgctggatatgaagacacaaagatcagtagtgcggccaggcgtattaaaatattacccttaatcaatgttgactcgacattaataatagagcatattaatgataatattattaattaattattattaatttatcaatagagcagatattgaacacttactatttgcaaggcattatgctaagtctttgccattattataattattgttattttattttttattcttttagaggtagggtctcactctgtggcccaggctggagtgcagtggtacaatcatagctcactgcaaccttgaccccctgggctcaagcaatcctcctgtctcagcctcctgagtaggcaggactacagccatgcactaccatgcccagctaattttttaattttttgagacgggtttttgctatgttgcccaggctgatctcgaacttctggcttcaagcagtcctcctgctttgaccttcaaaaatgctgggattacaggtgtgagccactacgccctgccctttgccattatttatctaatttaaccctcacagccatcctctgatatacatatgattatcatccccactttgggtcagatcataaaaccgaaccttaaggaggtcaactcacctgccaaaggccacacacaggaaagtgatagagctgagatttacccagttttgttgagcttcaggttttaaagccagaaagatttctcttttagaaaatgataaagaaaagtttttttattttgaaaaattgaacaaataatagataagaaggaaaattgtaaaaagagacagtgatgactaatgaagataaagttgttttgtaatcagacagaccctggtttgtattctgacccagccaccaattggctgtgtcactgtggattcaacacttctcttatctttgttttttatctgtaaaaaggaagttatgagcattacacgaaataaacactgacatgaacagattctcattcaatgttagtttgattttattgaataatattaacaaattacagtatctaattatgcagttcatcatcagacacaaataagcacttaatttctttttaatgatataaaatcttttctggctgggtgtagtggctcacgcctgtaataccagcactttgagaggccaasgcgggcggatcacaagttcaagagatcaagaccatcctggctaacatggtgaaaccccgtctctgctaaaaatacaaaaattagctgggcatggtggcaggtgcctgtagtcccagttacttgggaggctgaggcagaagaattgcctgaaccggggaggcggaggttgcagtgagcagagatggcaccactgcactccagcctggtgacagagggagactcygtctcaaaaaaaaaaaaaaaaaaaaaaaatctttttaaagcatcactaggatcagaaatgcaaatttttcagaaatttcaaaaatgtggagaaaaggttggacattttgttagggaagtaaaagcatatacatataaaattatatttgttctggaatataaaatatgttatttgtattgctcactatagatctagkgattgtaagaacttatgtagcattttatcaagcctccatatctctttggagacttcaaagactttagaaaggtatagataatatcaaatgttggtcaagatggtagtcaacaggaactctcaaacattgagagtaggcatgtaatttggtacaaccatcttgaaaaactgtttggccttatctagtaaagctaaagatgtatagatcctaagatctagcaattccagttggaggtatgaaccctagaaagscttgcacttttgagtcagaagatgtagacaacaaaactcacagcagcactgtttgtaacagagaaaactaaaaacaacggaaattactatccacagtaaatagaatgaattacagtaaatatggttatacaatggaaccttatgtttgtgcagtttattcaagtggttgcatgtggccacagttcattttgttctcaatatatataatatatagatgatacatgtatgtgtgtatacatatatttcattgtgtgactatactacatttaatttttccattctgttgtcatttgacgtttcagtttcagatagttagctattatgaaagagctactatgaacatccttgttcatgtattttggagcatgtatatgagcatttctgtttattatacgcctagaggtagaattgcagcagagtatgcttgttcagctttagtagagactgccaaacaattttccatagtggttgtaccagtagacaggcccaatatgtgagggtttgcttactccacagcttcaccaacatttggtattttttcatttcaatacttactttcattttcattttatatttcatttcaaaactttcatttcagtattttagttcattttgatgcattttcattgtagtcactctagtgagtgtatagtgatattgtactatggtttcaacttgtattttccttatgactaatgaaatcgaagaccttttaatatgtgtgttggtcatttgatatgctattattttaaagtaataaatatagggtccagacctatggggcttagcgggtgttctctccgtgtgtggaracgagagatctaagaaataaagacacaagacaaagagataaagagaagacagctgggcccgggggaccactaccaccaagacgcagagaccagtaatggccccgaatggttgggcgtgctgatatttatcgtatacaagacaacggggcagggtaaggagggtgagtcatccaagtgattgataaggtcaagcaagtcacgtgatcataggacagggggcccttcccttataggtagctgaagcagagagggaagacagcatacatcagcattttcttctatgcacttatcagaaagatcaaagactttaagactttcactatttcttctaccactatcttctaacaacttcaaagaggaaccaggagtacgggaggaacatgaaagtggacaaggagcgtgaccactgaagcacagcaccacagggaggggtttaagcctccggatgactgcgggcaggaatggataatatccaacctcccacaagaagctggtggagcagagtgttccctgagtcctccaaggaaaggaagactccctttcacagtctgctaagtaacaggtgctttcccaggcactggcattaccgcttgaccagggagccctcaagtggcccttatgtgggcgtaagagagggctcacctcttgccttcttggtcacttctcacaatgtcccttcrgcacctgaccctatacccgccgttattccttggttatattagtaacacaacaaagagtaatattaaaagttaatgattaataatgtccacgatcatctctatatctaatttgtattataactattctaactgttttctttattacactgaaacagtttgtgccttcagtttcttgccttggcacctgggtaatcctccacccacaaataaataaaggattattggaaaaattacttaataagattgattacgatctatgtaaagcaatgtatcagtggactgaggcttggttatcctaacagtgacacatgacttgagaatctcagtagcttaaggcaaggtttaactcttgttcttgctgcatgtctatttccaacagtcagtgggtctgctccacatcagcatcattctggcagcttctgtgaagggacagcctcaatatggggcattgctggtctccaggcagagagaaaggagagatggcaacacaatgggccacacacaagttcttagaactttggctcagaagtggcacacacttcacttacactcacatttcattggccaaaggagatcagatgtccaagactgatgttagtgagtggattatataatctaaaggcaagggcttgtaggaagaggcagtcaatatttgtgaacaagagaatgatcagtaacatctttctgcagagtaggcttataagagtattactgtaggatagagaaaacaagctgtgtgtctgtgggctgttgtcaacacatatatatacactacacactttttttttttttttttgagatggagttttgctcttattgcccaggctggaatgcagtggcttgatcttggctcaccacaacctctgcctcccgggttcaagtgattctcctgcctcagcctcccaagtagctgggattacaggcatgcaccaccacgcccagctaatttttgtatttttagtagagacaggatttcttcatgttgatcaggctggtctcgaactccccacctcagatgatccacccgcctccgcctcccaaagtgttgggattgcaggcatgagccaccacgcccagcctcactttttttcttttgttttgttgaactggttgccaacgtttaaaaattatgacatttaacaaagatgcagatttctggcttcttttggaaatcctaagctatagcaagaatcatttggaactgagttgtagctgcccttctggtgggatgtgcactctctggttttccatgactgtatctgcctgtcttctctgcagcagtgcctttcaaacattttttacgtagctcacaataaacaatacattttacattgctaccaaggactcgcatgcatgtgtgtgtgtctgcattcatatataggtatagatatgcatatacatatacattccaaagtaaaatacatcaaggaaacagtgcttaccattactcattgaaattgtctgttctattctatcctattgtattctagtacttttttttttttttaatgctggaatcaactccctaaattgatttcacaaaccacttctgggtcatagcccataggttgaaaacatggttgtctatcatgttacttgtctgtttctcctctaaatgctattggttagttttctagcctggattcctgtctaagccctttagggtttcaggacaattcactgtgtgggtgagcagcatctgcttcccttcacttaaacctgggcaattactggttttgcccaagggtcttaaaacttaaactgcttgaatatctggcagtttccccgctgacttttcccttgtctgatttcctatttcaataaaaatagccttgtaggcgaatatgccactgattcggagaatctcagtttcctgactgggctaggcaatcaagggcaaatgaaagtgagtcctgttgtacaggaaggagagttctcagatgatgaggatggtcatggggactttgttaccgaaggaggcccaagctcatgatttcacaggattgattcctccatctcactgatcatttaacaaatacttatggatgacccatgtgccagaccctgtgctagggaactcatccaaaacttacaaaaatttctcctagatgcacagacgatgaatagtaattacctcttcctgtgttttacccttcctatttcttcttttcttcccttgacccagaaattcatcaattgccctagggctgttccggcttagtgcttgttggtcagttggatgtgcccttctgctcaggtctttgtgggctctcactggtgttcgtatgcatatagaatggatgtctgcatcacattgtagggacagtgtatggggatgtgaagacaataagtgaaagtctgccgcccactaagacacaagcagcattgctataaactccagtggaaaaaggtgatattatagggaaggaaaaccgtattgtcatattttcatggaattcagtgaattgcattttgaggaccagtgccattttgatgctggaggattccaccacctttgtggtgttgtttcctggaagagattctactactgaagtggtgttggcagcaggtgtacccagcaaaatcaggtagcaaggcctggtggaacttggcagaaaggagctcactggggccatcagagacagtagtgaggcccccttgtgccagttagggggcagcagagacccaaaagtggattttaccagaaagggttgaagcaggagaggaaggaaatggcgaatgccttgacaggccatgtttgtgagtccaggaagacaactcatgggagctctcagaaataattgtggggtgaggtgagtgcatacttggatagagatgttacagtacctgacaggggcaagacccagtaatatatgggttgttactattaaacgtgaccccattttaagtcgtgggtttatataacaaggttatttatgcttgttatatgctttatgtgcattacctataaatgtccttaaacttttatcacagtgcaaatgcagctcattaccagaatccgtgagcactgtcttcaaaccctccccattgccttgacattggctttttcttaattctgtctctttttttggccactctgctcttgatcttgtgtctacatctgagcctgaaattggagagtccttggctactctataatctgagtcttctacttcctgctttccctattcagtctcccatttccttctccagccccatccctggtactagcaagtccctccctgatgtcttcaccatcygttcctttcagacacctgccacccttcacattagcaaaatgacaaaaaataagaataaataaggtgagtatagtagattgcatagtggcccccaaaagatacaccacagagctccacacatactaacccttggtccctcagaatgtgacttatttggaataagggtctttgccaatgtaattaagataaggatctagagatgagtccatctcctgggttacagtgagccttaaagccaatgacaagtatccttataagagacagcaaaggagaaggtggccatgtgaagacagagacagagattggaattctgctgccataagacaaggaatgccaggggcaccagaagcaggagctttctgaaggtgcatggcccctgccagcaccttaatttcaagtgtctggcctccagaactgtgagagaacaaactctgctgtttaaaccaccaaatttaggctgtgagtggtggctcacgcctgtaatcccagcactttgaaaggccaaggtgggcggatcgcttgagctcaggagtttgagaccagcctggccaacatggtgaaatctcgtctctattgaaaaaaaaaaaattagccaggtgtggtggtgcacgcctgtagtcccagctacttcggagagaggatcacctgagcccgggcagccaaggctgtagtgagctatgatctggccactgcactccagcctgggcaacagagtgagagccggtctcaaaatcaaacaaaaaagccactaagtttgtggtaatttataacagcagccctaggaaactgagacaatgggtgaccatacagcaccaaaggacttctatttcatgattggtgaacattttaaaataagaaaaggccaggcatggtggctcacgcctataatcccagcactttgggaggccgaggcgggtggatcacgaggtcaggagttcaagaccactctcgccaagatggtgaaaccctgcctgtactaaaaatacaaaaattggccaggtgtggcggtgggcacctgtaatcccagctactcgggaggctgaggcagagaactggttgagcccgggaggcagaggttgcagtgagccaagatcacgccactgcactccagcctgggtgacagtgagactccatcccaaaaagaaaaaaaaaaaaaaagtattacagaaaagaatgtgagaacatgtttcaagtattaacaaataaaagaatgcatgctaaataattatttgcaacacatcatagagccagttctcacctggcaataaggtactccaaaagttcattcataagtaaattgagactcagaatgcatatttttcctgcaggagtcatgtgatatattatggatgttttcaaatattaatccataataatcattttaagttaatcatatgcggactatagttttcttgaagcgagggattgttctacacgtatttaagtcttgctgtctagcagagtgctttgcatgggtagggcctccaataaatgcttgatgagtagtagttcattaaaaaattctttaaaattttttttaccacaaaacatctgcaagtagagtagttcattttttaaagcaccatacactaatatttaatagcagctgttttagagtcagattgcaaggcttcagatcctggctctgccacttacagaatgcaaatcattaagcaaatttacataatctctgtgtgcttcaatttatttgtctataaaattgtgatattaatacctatctcacaatgctgttgtgaggagtaaatgaattattatgtactaaatacttagaacattacttgcatgtacggattcaataaatcttaaatattgttattagctcttaagtatatctcctcaactaaattataaactctgaggaagaggcaagatcctatcctttttaaaatcccggcatctacacaatttcttgcatattgtgtgcactcagtgagtatttgttgaactactaaaaggaatgaatgattggctatatgtttacaataccttctccataaaaaatacatatagaattgataacattctaacatttgttacagtaaaaaatgtttttagaaattaaatagaattttttttttaagacagtgtcttgctgtgtcgcccaggctggagtgcagtggcatgatgtcagctcactgcaacctctgcctcctgggtccaagcaattctcctgcctcagcctcccaagtagctgggactacaggcacgtgccaccacaccctcctaatttttgtatttttagtagagatggggtttcaccattgttggccaggctggtctcaaactcctaacctcaagtgatccacctaccttggcctcccaaaatgctgggattacaggtgtgagccaccatgcccagcctaaatagaatttttaagatgtcagagcaaaaaggaaattattaccagtgtgaaattcttcactatattttagcccctaagaggcagagaccttgtcctgtttctttgtaactgctgcattttgcgtgatgttttgcagaataggcatgtgcgaccttgtacacagaaagggcttaagcaaatccttatgcagattcctggagttatttttctgtgctggtcgctcctttccagaattctactctgcaacttccagctgccttagccttctgaactcagagccccctctccttacctccacgaggcctctggggtctctgggtttccccttcttgcacttgcagtttatacattgcctccaagcagaaggcccaggtgtttctcatgctcatcccatctgtttcccctctaacagagattagtcttacaaggcctcgtgttcagtctgaaaacagctgcttcctgtacttcgttcagttctctaattgctcacaataaaaagctaagtcctttcttacttcatcatggcyagaagcagttcccatgcgaatgtcttggttaaaggagaaaaatgtataaggtaactataaactaagactttcacatcaattcagttggttcttttgttaagaattacagggttgggcacgatggctcacacctgtaatcccagaactttgggaggctgaggcgggaggatcccttgaggccaagattttaagatcagcctgggaaacatagtgagaccccgtttctacagaaaaaaaaaaaaaaaagtaaaaattaggcacagtgtcrcatgcctctagtctcagctacttgggaagctgaggcaggatgatcaatcccttgagcccaagagttcgcggttacagtgagctataattgtgccactgcattcagcctaggtgacacagcgagatcctatttaaaaaaaaaaaaaaaaagacaaaaagaaaagaaaattacagtataatttttctgtgttgaagagcttctgctggacaaattttcagtcttggtcggcagtttaactcaagaacagactcttctatcttcacttccagcttacataaattagaatggagaagagaattctaaagtataaagaatgtacactgttctctgccccaattacacatctgtctcacggcttgttaggcagcatgatgaataagcgtgtcatctctctccatttatttgtgcatccatttttatatccatagtctatagagactttcattgcttctcacaaatttgtttaaacttttaatagtgatatatacagacttcctcatctaagcacagacacgatttctatttaggtcatttctgtgcagtcacttcctcttcctaggtcatagccctgtagttctatcatacatagactgtctattttaatagaaacctgcagcaatggtggaaggaggggaacgggagtcatttcatcagaaagatgcattgtatctactggagaattttcttgtcttagaaacactagaaattatattttytggaaatttcaaattttactaaaatgtggtcattgtcaattatgtaacaggggctttccttttcaatatagcgactatcagtaatagtgctggaaatatgataacaggccacattctaaaaattcatttcctctttaattaggacctaactcttggaaactccttcatgtgagctgccacaacatcatctaaaagcaaactgccaaaaaatcatcttaaaccgcatcatctaaaagttattttggcaaaatgcatggtctcaaatggaagataatgacagctaagatagaatttagaatgagccccagcactttgggaggccaaggcgggtggatcacttgaggtcaggagttcgagaccagcctggccaacatggtgaaaccctgtctctaccaaaaatataaaaaawtagccaggcgtggtggtgcatgcctataatcccagctactcgggaggctgaggcagaagaatcacttgaacccaggagatggaggttgcagtgagccaagatcacgtcaccgcactctagcctgggcaatagaatgagactctgtctcaaaaaaaaaaaaaaaaatttagaatgagcacgaagttaatgaataatacctcagtcacattctagtaagaaaccattcctccytgtgggaattagagccctgcccccagaaccctggctctgaggtttgacttctgttatgtactgrcagtccccattacgctcatggttccatggtgccagcacaggagtggctgatgacagaggctgacatgtcatgcacatcattctgtctatctcattgtttagtgtctcttccttggtaaatgctctctgataggtgttaccatgcaatcgaaagatcacacacctgatactactatgtgtctatccatttgcctctttcctagacatcttatccctagcctttcaaactttctccttctggatccctgcatatgtacacagtgtatacaatgaactgtaattaaataaactacataatttacttattgattaggtctcttttaaactatttcttgtgagttcaagaaagcagagatctttgtagtttttttgttttgtattttaattactactgtatccctagcacttataatagtgtgtggcagagaacaagtactcagtaaatagttgctgggtgaatccatactaaatataaatctttgtcaattagtatatgtgtgagaaatatctattcctagttagaggctggtcttttcatttactttattgtaaatgatgtttgaatgaacagaagtatggaattttaatgtagttaaatttatcaatccttattaagctatttttttgtttcttatttaagaaattctctgctgcaaagtgataaatatgttctggtatattttcttctaacccatctttcccccactgatctgcaatgacatttttgttgttaattaacttttattaccagtgaatctgtttctaggctctctattttgtttcattgtctgactatcctttttaaaataagtttttttagagacagggtctaactctgttgcccaggctggagtgcagtggcacaatcatggctcactacaccctctaactcctgggctcaagtgatccgccgcagcctcctgagtcactgggactacaggcatgggccatcacttctggctaatttaaaaagtgtttttttttgaagaaatggtgtcttactgtgtagcccagactggcctcaaactcctggccttcctcccacctcagtgtcccaaagcactgggattacaggtgtgagccactgcacccagcctatcctatttatttttatttaccattatttatttttaattgctggacagtttgacaagtccagtttgagctagttatgtatcacatcccatttgcaagggttgtttgtcttgttcaaaggacaatgagtacaaccaatgtcaacagaagttgtttttcttccttcgaagagaagggatgcgccaggatggagagtgcctgcattcctgcccatcagggtactatggacactgagccccagatatgaacagatgtgcaacttctctcggagaaaacaaaataaaaaatacgtcattggtccatgttcaactgcccatcgtaaaaaagaaatacatcattggataagcaacttcattcaaaagtcagtgccacagcaagcaagaaattagaagcttgtaaaaataagatggaattttgagctgggcayggtcgctcatgcctgtaatcttagcgctttgggaggccaaggcaggtggatcacttgaggtcaggaattcaagaccagcttagccaacatggcgaaaccccgtctctactaaaaatacaaaaattagccaggtgaggtggtgagtgcctgtaatcccagctacttgggaggctgaggcagaagaatcacttgaacccaggaggcggaggttgcagtgagccaagatcgcgccactgcactccagcctgggtgacaataaaaataaataaatgaaatgaaaataaaataaggtggaattttcacccattgacaaaaagttaataattattattrtatctaatttctggacattgaatagctcataagccaacctacttatgagcatctgttttctggatgagcttcaaccgttgcaagtggatttttcttctttggactacttgtcaaactgtagtgtgaatcagaggagtttaatacagattgctgaagtttttgatttgtaggtctgggatgggacttgagaatttgcttttttccaagttcccatgtgatgttgatactgctggttctgggaccacattttgagaaactttgttgtcaataatgtgcccacagctgcattattttttttttattttcccaagaattaatgtcatcagatttaaatagtagtatatattaatactgaatgacaagttagaaagatagatttgtttaaaagataatattggaaataggcacatgaatattttgaacttaaaataaatgtttcagtgatttttattaaagtaatatgaatattgtcctccaaaactttgatgatagagttttgtttctttaatgtgaattactttcttacattgtgaaaacttagagcatattcttcctcaggcctaagtactgtataggaactattaagtgagaactttaacagtaattctccatatgcaaaaaagcatttttactagtctgtacttaacaacttgcaaatttgcttttatccraaaggaagagaattagagaaatgattttagtaagaaatgctaaaatcaaaaagataggtaaatatttaaggaatcattgtagtattcccaacagttttatagatgaaattttaagttctctgggttataacttgctttstgatgccattataaacctgayggctgagacactggtcgatcacccattaggaatatatgctaaaattgttgctttcagtttttaaaatatggcttaattttatgtttgcttaaaattggtttgttttggcctggtaatatctcgggtcccacacatatgatcattcacaattatcatatcgggctgagcagggtggctcacgcttgtaatcccagcactttggaaggccgaggtrgacagatcacatgagtttgggcccagcctggccaacgtagcaaaaccccatctctactaacaataaaaaaattagccaggcgtggtggcacgtacctatagtcccagctactcgggaggccgaggcaggagaattgctgaacccaggaggcggatgttgcagtgagccaagatggcrccactgctctccagcctgagcgacaaagccagactccctctaaaaaaaaaaaaaaaattattattatttagttttatcttctctatctgttaatgagagagactaaaataatgatgaagaaaacattttaatatggtatatgaatagtaataaaataatataataagatgtatctccaaaatctgaatctaatggtactatattcgtattatagctgattctttacaaaaagcagtcttggcttactggaaaattcacattttaaaagtcgatcagtttcattttttctggagaatgttagctttactgaaagtataaaagtttcgttgttgtagacaccaggtcctaataaaaacaagtaaaagaagaaaaagtttgttatgggtrgaactgattaagtgaggtaccactgaagaattaaagatatctcacacatactttgattaattaaatggtgaataagaacttgttttaatctcattattcaagtcactaaaatgttaaacaggtaagacaaaaaggcaattattacaagtttttacgtaaaactatgataagattttttaaaaagtgaaacaccacccatacacactgaattcatttggctggtattgattctgaatatgtattttataatatttcattggccttgacccacaaactaaacacagacattttctcaattagtcattttcaggtttattgcctaagatgctaattgaaattcagggcaggcaaaaatacatcattggcctttgtatatctttgaaaggccttctgatgggaccttgctccgtataaaggcttctcttctctgcaaactgaaagggaccctgtgtgtgaagtgtgttcagtggggtcttcaaggaacaacatagagagcagccgctggccagccggaagccaccatgcgctgtcctcaacagagcagctccaggctgtatgacccccaggcaattaggcaccaaaagaagatgytcacactttccaaaattctttcccagggctgggggaagggagccagacttggagcccctatgtggaacttagtctccaaggaaagaaagcatgttctcatcctacaaacactccattttctccctgaattagtgtcctttctttgaaccagatgagacttcgctcagagctggaggctatggccccttagttctgtttccacagtgcttccagccctctccccagtttggaggcccccraaatgaggcgcttatctctttgattttgtgaaagaaaatgcacagttcgtctatttggggcttctgaaagatgttaggccctgaagaaggttgactgggagactgagtggggagtgacagaccatgaccttaattactgaccttttgttatagattaacttccttcctattttattgttcctggcccagaccwgatagcacttgagataaaagatcccttgattattacatccttaatgtggaatgttaaatactcccttcccccaaggaatcactgcctaaaaccagtcagattgctgcgactgtgcactaaccttgtgtggaaaatgctgtcatcctgttaagcttccccataccgtgcctgtataaacaatcctcaaacctcgctgcttcagagcactaaccccatctttttggagtcctcctgggtgaccctcctcaaactttgtgctcagtattttaatcctattgcctggatctcgatttaaagttgataattttcagagaattcttcattttctctttgcatattttattgtttcctttccatctgtttttcttttacttactgcctgaagccaagagacaatgtcaaggtgtcttagtgaaaggagctcatacttaagggttcctgggtcaaaacctacatctctcatttcttagctctatgatctacctgtttccttaatctctctgggcctcagtttacccattattgtagtaaaacatgtactacaagttactttttatttaactacttatgccatatttaattcccaaccactaatattacatattagttatatattgttaaatcataatgttctttcactatttcttttatgactgagaaatttcttttcaatgtataaatcatatacatgttgctcctggacaaaactgagggtcaggctgctacttctcstggcccaataatgagatgcagacaaactggggaagagaggttttatttttgcatytggttacagggagaaggcctagaaattgtcaccacaccaactcaaaattacaaagttttccagagcttataaaccttccaagctgtatgtctacatataagtgtgcattcatctaaagacataagtgattaacttcttttaatctataactaagatctgagtcctgaagacctttctctggagcctcagtaaatttacttaatctaaatgggtccaggtgctagggtgattacccttatcttgtctcctgctaaatcacagaggtttggggagttccttcagacctccaataaacttgtgtgtggaggcctggggaatttcttcagactgacaataaaacttgtttattccagtctggccaacatggtgaaaccctgtctctactaaaaataccaaaaagttagcygggcgtggtgacgtgcacctgtaatctcagctactagtgagacctggcctgccacaatgtggttaaggaaacatattaaaacatttttaaaaatcaagattttccatttcaatggccttgtaattgattgaaaagtttattttgagtcacatggtgttctagactcttgtggagggtttagattggaaaataagtaatgacagtgaagcagttgttatgttcgtataaaagaaagaaaagaaaaacccacaggactttatttggttttaaaagtctatctgcaaagatatagtttataggaaaattcaattccaaatgtttctcattgctctggagtgtgtgaagaagaggcctaagaatattcttaggaaggcaaaaactttcagatgcagttcatatgcttgacacctctgtttcacttttggctgacttgtgtagtctgatttttggtcactgacaggctcagcatcatgagtgtgcaagacgtaagggaggcaggaccttgtcttttcaatggtgtcttcctgggtggctgccagaattcatcattattgcactctactctcatagcctcgatttctgtttttgtttgcttttactgaaattggagtagtgacacagagtcagatcattgaaaagactcacaagattccaaagggtatactggtagagtataaactggaggataaggtacagcgggagaaagcaagtaccagcagacacagagggggctgagactcctgcaagcagcgcctttcctcaggctcactggrtgtgctctgtgtttgggtgtgaaccaccaagatgcatgcatgatatctgttttcagggaagccaagatacaagtgtacagaaaagccattatacccccgtcacattgctgaaactggatgattaaaccacgtaccaagcggtgtctaaatttcagtaataatgatcagctagtagagggtgcctcaaggcagtttcagactttaaataacatagtagaaatcactagctagtccatttcatccttatcattgttgcagaactttctccttagttcagctaaaaccgggttcttgtcacacaaccggaaaagattaggctcagggacacatagaagggtgaggggcagaatttattgggtgaaaaggaaaaaggaaaaagaactctcagcaaagcgagagggagtcttgccaacaggccctccacctcacagactgaacaccaggccaccacacaggaactgaagaggccaggctcctccccgctgaacaagcgtaaacttctcttggctccaccctcttcccccagtgtgcaggtgggcattattcagagagaatcagctgagaaagggcaggctttatccgggaccagcagtccagttcttcagccttcaggctcttttaggcttgaaggcagggtttcgtgggggaccttggtaagaagagttcttttcgacactttaatgtagattgtaagaggtagaaaaaaattgatcacatttaacatatagttacttaaaaacacatctttgagttttctagacttctaatatgattgtagaaaatcagcgtggcagccaacttaagacagatcaatacctcgaagtctgtaactttaataagaacatcagaactgaaattctatattagttaccctattgtactcacagtcatggaatacagaacaggaaagattctggaaacacattttgatagtcagggtcacagatattgctctgtttcagtaaccaggttttctacttatgaaagttatttaaaaggcaatgaatattcaaaatgtgagcagctattgctaccattagctccagaatcagttctgaagaatttgtaggaagtcatcttgaaaataataaagcaatatatttttcagaaatagtatccactaaatcataatctgaggccactttactgaggcgtttatatttatatttatattaatttgttattttacacagaaagggaaactatgacctaaagacagagataacaataatctgattagcattagccaccccattccaacaacaaatcacgttaataaggcatttttagaagtagcaaagcatagtggttaagaacatatgttctagaactagacagtctgagtttgactcctgataccacttattttattctaaaacttttggcaaattattacataacctcccttgcctcagttggccaagctgtaaaatgggactaataatggtgtccaactcacaggattgctatgtaggctaaaaggttaaaagagttttatatttctaaaacaatgtgcttgtaatagtcttggcacattgtaaacattgtgtaagtgcttattaaacaaataaattcatgcttgtaattgaagatcgccatatgagatacacattctagtgatctatatgtttatcattagatatatgatatatacacacactcatatttcagtcccctgagggattaacttttaatcccttgatttgcaaatcaagttgtaaattacacgtataaataaaatacctttgtagtgattcgttcattataaaattatgctaactatgttggttttcatgtaggcataagctggctctataaataaagtttgaaaataagtaaggtataaaggaaccctggcgggatagataagatactaggaacagtggtttgggagtgaggatgggaagtagactgatgtggaacaagatgggagtgagactttttttagtcaccgtctatatttttataatttctgggtctggaatcagtatctcctcatcctaacttgttcatatgatgagttagagtcatatctgcctgctgttagttttttcaaagaatcttcaaatggggcaaccccctttgggtcccctccctttgtatgggagctctgttttcactctattaaatcttgctactgcactcttctggtccatgtttgttacggctggagctgagctttcgcttgccgtccaccactgctgtttgccactgtcgcagacccgccgctgattcccatcgccgctgactcccatccctccagatccrgcagggtgtccgctgtgctcctgatccagcgagactcccattgccactcccgattgtgctaaaagcttgccattgttcctgcacggctaagtgcctgggttcgtcctaatcgagctgaacactagtcactgggttccacggttctcttccatgacccacagcttctaatarctcatcgcatggcccaagattccattccttggaatccgtgaggccaagaaccccaggtcagagaacacgaggcttgccaccatcttggaagccgcccaccaccatcttggaagcsgcttgccaccattttgggagctctgtgagcaaggatccccggtaacattttggcgaccaygaagggacctccgaagcgtttgtctcttccagaattgaaactgtaaaactacaaatggttcttcaaatggagccccagatgcagtccatgactaagatccaccgcagacccctggacyggcctgctagcccatgctccaatgttaatgacatggaaggcacccttccggaggaaatctcaactacacaacacctactatgccccaattcagcaggaagctgttagagcagtcattggccaacctccccaacagcacttgggttttcctgttgagagaggggactgagagacaggactagctggatttcctaggccgactaagaatccctaagcctagctgggaaggtgaccgcatccacctttaaacacggggcttgcaacttagctcacacccaaccagagagttcactaaaatgctaattaggcaaaaataggaggtacagaaatagccaatcatctattgcctgagagcacagcgggagggacaaggatcaggatataaacccaggcattcgagctggcaacggcaaccccctttgggtcccctccctttgtatgggagctctgttttcactgtttcactctattaaatcttgcaactgcaaaaaagaaaaaaaaagaatcttcaaatggctattgatgctaaagaaagttctgaaggagcattctccaatgcagttatttcctacagaagattttaagtgattttttaaaaaactgcctcttttytaaaaatatttcagcttttattttagatatgggggtacatatgtaggattgttacatgggtatattggatccaggtagtgagcatagtaagcaataggtaaaaaaatgacctcttattcaagagggtacctcattactatttacaaagtgctttcaaacattctttctcatttttttctgacaactctggacgtccccccctacttttagaagaaaactaacagtcccaaaaatgttttggtgtaagtcaatatatgaacccaggtccatgtccagaactgtttaccactcacctctttataaaacggtaactgtggccaggcacggtggctcactcctgtaatcccagcacttygggaggccgagggaggtggatcacttgaggccaggagttcaagaccagcctggccaatctgttgaaaccccatgtctactaaaaatagaaaaattagttgggcatggtggcacgcacctgtaatcccagctactcgggaggctgagacaggaaaattgcttgaaccggggaggtgggggttgcagtgagctgagatcatgccactgcactccagcctgggcaacagagcaagactctgtcttaaaaaacaaaaacaaacagtaacagttacttctctgaagctattattttttatcctgttacatatatcaaagacttcatttgggtaactatattcacgattattttaagctttctttttcattaccaatagttgggctaacctttattttctggatggtaaaggtgttttatagcaacaaaaacaaacagctaagtcaatccgtccaggtaccctgttaaagcttcaaagactctggatcagaatgatctctgctatacacacatacccaaagaataaacaaaaatgctattgctaatawctctcagtcccttgagggattaacttttagtcccttgatttgcaaatcaagctgtaaactatattaattcccccctttctgtacctttcctttcggatgatgctcatctagcattttgctgtcttgaataccttctcctttctcatccctatatattttcattctttatttgagtataattccactttaacacattaccttaatgcaaaccattatctccatttttgctcacttctttccctttcacagcacctcttctcaataaaagtctatatgtagtgtgttcccatggtgatgggaactaaaattacttataatcaatggtttttatattgtcgctgctgcttatctcttgggttaggcctctctttgcagccaggtcacaggtaagtctatgaaggtgagatgaaacaatatttaccagagattgaactacttctggaatatttgtgaatccagccttcaccattattgcaccatctagatttcacatctgtttagtgtattaccaatatttcctttttccatataatgaattcttttattgtagtaattgtggtatcagggcaccatggatattcatagttataagaagatattatcatagaagaaaattgtcatgccatcattcattatggtgttttgcatctttgaattttaaacagagaaagagaaagaacagtcaagctagtaagcaagagataaccaatctactttgggaaatgaccaatggttcttgatttcagggtagattatagaaaagagaaaagattatagtattttatatctgcaaaacttattccaaaacaaatcagtaaatccaggttaaaatacccaggtcagacagtcacatttttactaataaaaawtaactagcagcccgggygaggtggctcatgcctgtaatcccagcactttcggaggccgcggccggcggatcacgaggtcaggagatcgagaccatcctggctaacacagtgaaaccctgtctctactaaaaatacaaaraaaaattagccgggcgtgttggcgggcrcctgtagtcccagctactcaggaggctgaggcaggagaatggcatgaacccggagggcggagcttgcagtgagccgagattgcgccactgcacgccagcctgggcgacagagcgagaccctgtctcaaagaaataaaataaataaataaataaataaataawttgcagcccattgagtgaactttaaatgatcatgctactttgtgaaatagaatatcacattactagatctgttgtgtgctggacaaatgccagcacaatgcagtactttgctgatatagtgtggaatagattttgtgctgcagcaaagctgtctatagacttcaaaaaacaaaggttatatgagcattaaccaaactgtttaaaatcttacagtttcaaaggaccacatattctatgattccatttatatgaaatgtccaaaataggcaaatctataaagatagaaaatagattagtggttacctgggacttgcggggatagaagcattacagggtcagggcagtgaccttccctaaaagatacagaatttattttctaggtgatagaaatgttctaaattgattgcggtggtggtcacaactatgtgacaatattaaaaatcattcaattgtatactttaaatgagagaattgtaaatatatgagttatagctcgataaagtgataccaaaagaaagatcttccccaaaaagctttcccgtaaaaatacatgttccacccaattaaaatgcaatgtcaatacgtattcgtttattttattgcttaaaataatgtgttcttttgcacaaagaagaaaaaatagaaatcagaatgtaagaagacaagtcatttatgatttattttgcaccatttatttcaactgtttaaaataaaagggccgattttatgctgctgtcaaggttttgcttatgataaatgtttgaagtgacactgaaatgtgaactggttgtgagacaggctctccttggcttctaatggaggcaggtatcccatgggacagatgcttgtattgcttcaaattcattgtaggagaattaacccttcgtggtgccactttcttcatatgaattaaagtgaaaattgccagggtcagtggcttacgcctgtaatcccagcactttgggaggctgaggcgggtggwtcaccggggtcgggagttcgagaccagcctgactaacatggtgaaaccccaactctactaaaaatacaaaattagccaggcatggtggcacatgcctgtaatcccagctacttgggaggctgaagcaggagaatcacttgaacctgggaggcggaggttgcagtgagccaagatcatgccattgcacgccagcctgggcaacaagagtgaaactgcatctctaaataaataaataaataawtaaaaataaagtgaaaattatgcagtatgggtttcactgtagttttactactcttgtatagaggaggaaaaatttctcctctaccttcttacaatctctggctaggcctaagaattaaacttatataatacagattaatagaagagaagcatacaaattttattataattttacttgcacatgaaagtcctcacaagacaatgaagacccaargaagtgaccagaagtagtaaacttatatatcttttagatgaagaaatgataaatttgtgaagaagtgataagacaaagcagtttggattataggcagtaaattgtgaggaagtcactaaaaatatagagggggaaactaatggaagataagggatattttagtaagtttgtacagatctatttcagagtcaattccaagtctcaggtgataaagatgttcttttcttcctggtacagggagggcacctttctcctggaaattttaatggtgtgtttttaagtagaaagggggaggtcaaaaggctttcctgcatctgctatttctccattgctttcagctctaaataatcagtatgccaaagtggcatattttggggtggcacgtcctgaagtccttcacttgtttactcactcgttgctaatcaggacttgatcatctttgtctcacccctttttacagccgtccagccctatgctttttattttatgccattatttaaatctgatgttccattcagttctctacagttggaagggtctagcttgggctacctttgkattgttcaaaatgcttttttaaaaggacaaaggtcttgtggtcaaatcagtttagcgaatggtgcataccatatcttgctcttacagagtctcagtgcacactaacatattaaagkttctgagaaatccagaagaaaaaacaagtatgtaactttatttaacctaatatttcccaaacttttttttagtgactcacagaaacactccgtagaactagcctctgcagaacaccctatgggaaatggtgttctggagtcataattatctccccctttattaccttattactctttcccagctatgacagatctttttatatttctttttttcttcccgaacatgtttgttttaagccacaattcaaacttgctacatttactttttcctggttattgcccagttgttaagtctggattgccctgggaagatgctgattacatggtgctctgaataccttgcgttctttgccagtagctctcctaaagatttgtgatgcatacattactgcccaacagagaattgggcttgcctcattgcaatttcagaagacaatcctcctgcgtccatcagcttgttattggctggcaccacagagatgtgtttctctggccctcattaattgtaaccaaccctaagagagttaagttgtatcaggcatgtgtayaccttacagtggataagtttgtcagatactttccttagtgcatattttttaaagagatagaataaagtataaatacacatggaatggatgtcaccaataagggtttttaaacactggagaattttatatgggcctgctttgtagatatccttttttttttcaatctatgaactcaaatatatgaaatatgtctgtaccctccttcttttggctgcccagctaagctcatcccaacaasgcttcccagctttcttcaggtcaccaccaatccaatccaggctggaagtgatgagactgagctgtggaatacaaggagcgtgcatggggtgctcttctggatcctggggatatagtggttaaaccgttactgacaacatgctctcatggctcttagatctagtgggggaaagatagccaataaacacacaaagaaatcaaatcttgataaacacttttcagatcactaaaatcagattatgtgagtgtgaccaagtggctgctgtagaaggaatggtcttagaaagctgcttttggagatgacagttaggttgaggatcctagtgaaaagagtgtgaacaaggagaaagaaatccaggcagaggagacagctgctgcaaaaactctaaagcaagacccagcttcaggtcttcttcttyttttttttttttttttttttgacacagggtctcactctgttgcccaggytggagtgcagtgacatggtctcggcccactatagcctccacctcctggactcaagtgatcctcccacttcagcctcccgagtagctggaactataggcacatgccaccacacccagctaatttttgtattttttgtagagtcagggttttgccacgttgcccaggctgcaccttgaagtctttcaagaaccaacagaaggccagggaggggagcaaagtggatgagtgggagaaggatacttcctgagctctttcaaggaggtcagggcaagtcgcatagggttttgttaaccctgacgtggatttgagaawcatcagcacgcaaggaggtatctaaagctggaggcctggatgaggttgcctttgggaagtgaggaaacagcaaaaggaggggcttggtacagacctggatggctcaacctttagaggttgagcagagacgaggggactgcaaagaagcagccaggcaggtaagagttcagatgtcygggaagccacacgagaaagtgtttccaaaagcaacacatgctgttgaagaagcccagaaagaggaagatacagaggtggccaccgatccaatgacaacgtgcaagttgttgatgactttgacgagaccaggttcagtgttctttgggargattgaggaggaatgtgatttaagaatagatgttcatgaccgtagaagtggaaatatgaatataaaggttaaggtttgtttgttttaagatgggacttactgtctttaaactgtctgcagtagaatggaagcaactaatgaaaatgaaggtggggatagaagccatatctccttggggtttttttcccccttaaggaaatatgaggcaaggttttcagggagggaagatggactgactgtaggaagagagagaartaaataacttgctatactgtgaacatgtagtatgaccactggacagtatttacagcctattagaatttgagagattcaggactatttgttttttttaagtccatcactcttatcagtgattttgaccaaatttagttaatacygaagtcaggatctgaacccggggacgtcttgctcagagtctgggcatttgaccactccactccactccactccactccactccactgcctctccacgagttacagctgaaactagtccccagtcagcacagatctgtcatttctccagttctcctcagctatgagcrtgcatagagaaggcasagagttaggttttatgaccaaaagagagagatgagacagaattaaatgtgtttgcaagtcagtaagtatgckatgatggtgaaatcaaagaagtgaagaaccaccgttgtagataatgagcaaattggggatcaaaggataggaaacgttgatgaggtggaagagygagtggtttgattggaagaagtgcagagcctgatttggaagaatcagaggtgcagttattggtgataacatgacaaatgatatgggtgtgagtggctcatgtgggtacaggagcagatcacctgtgttgagaaggttgaggattgagaagtctgggcctgtcccatggatctgacatccaggggtcccagccttyttgttttctacaaaagagaaactcagagcctgtgcccctggaattttcaaataaagcatgtgcttgtcccaaggtatggagaatagcggccgtgcagccaataatgtcactgggctcacttgggctaaagtgggtctcccctttccttccctgccctccctctacccygaaactttccttaactactgaagatcaggccttcttggccccaacacagaaatccctgtggggtggggggcaaggagaactgttgtccactcctgtctgcaacaaaagaagagttcatttttggccaaatgaatgacaatgaatattagggtcttggactgccagaactccctgccagtggcactccctgggagagaaggcctgttcccacacccctctctccagctttctccacctggaccrgatcagttgttctcccttactcccctctaggatccagaattcctggtttgactatcaaaagtaacactacttataaktatttataggatacatcattgactctcacattcactttattataaaatttctttttctmtaacaactctaggtacttttattgttattaggccattgttccttactctttgttttcttgtattatcacatcagtcagcgaccaaatcctgttcattctaactgagatgttccccgatctgtcccctccgtattcttcatgtcttctctcatgttgggcattggagcagctgcttaatttgttctctttgacctttcttgctaaagtccaccctcgcaactctcaacagagtcacttggcaaaacgtaggtctgatcgtgtggctgttttgcttaaaagtctttgatggttccccagrttgctttgttaaacaaaggaatttctactttaaaagtagaatttcctgcggaatctttctcaagttactttgctccaaccacactaaaccgcaccgttccctaaaccacagcctagttaagaactttaaagattccaagcactgactatattttggttcctcccactacttcagaggttcgcgacactagactaatttaacattttattctacaaaatagcaccgaacttaggcatatgtggaaaataactagctgttttccagatttttctgtttctgtcttctcttttcttttgatcactgctccaggcttgctggggctgtaaggaaatgctcagtctaactggagaattttagcattgccttcaacacaaatataaggctacttctgtttgaaggtttatctctggctggaaaatctgccctcctctatctccatttagttaacctttacttttccttcaaggttctacccaatgataacttcctttataaagtgttccctggctcacccaggggtaatcaattgcttagscttttgcgtgtgaacttctgctyktgttaccataaattatctgtatgtctagcatccttgctcattttaccatgttatatcattaaatcctcataattatcatgtaatcttaagtattaggattcctgttttgcagatagtaaacaggggtttgttacccacctaaccaagctattattaatatctaatgtgacaatgggtataattaatttataaaagactaagagcattaaaactggaaggcagtattatttttaatatattgactctgtgtggtgacaagcgttcatctgtattttttcttcttgccaatagtgaagggaatttatgattcctacataaagaaatctttttaatgttaattaaactaaactgtaagaatgctgctatgctcaggtgcaatgcaaataatgaggtgactctatccctgccatctcaggctaatcccctctcccctgaggagctgagactcagctccctggaggtgaaargctaaagcattcccctgttgtgccattttcttccctttctctcatgcattatttttcttactstggttattcttgatgggaatttttagcagagctcagygccatcttatcccaggaagaaaaaaaaattgtaggagataaatgtatgatgaatggtgcaaaacacaacagttgmaatcttttaaatttattgtgaaattaaagaacatgcccctagaatataatcgctggcaattcaaaaagcaaggatttttagcaaaataaataagaccagttttcttcctctgggccttgtgtctgttcatctcagtgagtctttcagcttaaccagtgttgcagcccaagctcttccttgtccttaattagcatcaggagttttcattagttattttacgagttgttagtgatcctcattagctttgctgtggtcttaaattttcttgacatttactgtttcactgcataagattttatggttaattcccagagtatataagccagattattagccgttatattttttacaatgtatatattcccatttcagaatctcttgtatcttaacatttttctttacaattttatataaatgactgtcatccagttcgttgggcttcctgatatcttttttatacatattaaataaggaaaaataagtaaatatatatatcattcactcagttgatagatttttcaagaaagaaaaaaattaagataatatgtttctacaaaaaaagaatgtaatgaaatactgtaatttgactttatagccaaattaggggaacactactatttttcattctacaattattccacactatgctgcaagtattgcccaaggaacagaaggcagaaaccaagtaacttgacaatatattagagaagaataacaagtcaagttattttgaagatttaggtgtattttatttcaaagtgcattgttctccctttgtgcctccttctcaaataacacaacacaggaagctgtcatccatgtaatatatattttttgggggattaatcacttgtatacctgttttattattcattccatggtcattagggcctaaaatgtaccaggtattagggacacaggataacaaggcagcaaaggatcattatattcagatgcaaaaggaaatgtaataaatataaaaygtataaaaagtaagtagccagtttcaaataataatcagtgtcattctgtcaacacttattttctaagtatgtactccatgctaaatactaatctataaagtaactctgatgggtgagtggagggcgaggggagctattttatattagttgctcagggaaggtttccctgaggagatgacatctgaaatgagacttaaataacaagtaaacacagaagagtttttcagctgagtttctgggagtctgtggatagatttcaggaggtctatagacttggatcagaaaaataattacatctgtattttcactcaactcagactgaaatttagcattttcttctatttgaatgtaracaacaaatctcagtagtactagtagcacttgttactttgttaccagtagaaagtatagtttttttaaattatatctcagttttcacaggtgtcttgaaatgttatcattgctttgaaattatgagatttcttggatgtgatactagatctgattctaattgtgttaataaagaagcacatgtattactgtattgattatgtattactgggtaatgaatgacccacaatttgggagctttaaacaataacccatgattctgttggtcagcaatttgggctgtgctcagctgggtggtgtttttttttttgtttttttttttgagatggagtctgtctctgtcgcccaggctggagtgcagtggcacgatcttggctcactgcaagctctgcctcctgggttcacgccattctcctgcctcagcctcccaagtagctgggactacaggtgcccgccaccacacctggttacttttttatattttttagtagaaacgaggtttcaccgtgttagccaggatgatctcgatctcttgaccttgtgatccgcccgcctcggcctcccaaagtgctgggattgcaggcatgagccmctgtgcccggcctcggctgggtggttcttaaggacttgccaggattgctcatgtggttgcagtcatctgacagccccactgggccaaatagtccaagatggccttcctcccatgcccagcagctggtgctgactgcaggctgggccacatggctccaacaggctaccctggggctcttcacatagtcacagtgttacaagacagcaagagcatgagccacaaagccccgtgaggctcaggctcagaactccccagcacttccactgtcttctgtgggtcataacaaatccaaaggccagctcagtcagtttgagagggaattccatgggttgtgacttcagggaagtgtgattaattgggggccattaatatacttacctgtcacctaccaagtcctaatttttttttttttttttttttttctgagacagggtctcactctgtagcccaggctggagtgtagtggcatgatcatggctcactgcaggcttgacctttggggctcaagcartcctcccacttcagccccctgactagctgggactaaaagtgtgcaccaccatacctggctaattttggcatgttctttttttgtacaaaataatcttctggatggggctcmccatgttgcccaggctggtctcaaactcctggactcaagtgatcctcccatctcagcctcccaaggtgtggggtttacaggcatgaaccactgtgcccagcctatgtcataattttaaaaattattataataagttggccgggcttggtgactcacacttgtaatcccagcactttgggaggccaacgcaggtggatcacttgaggtcagaagttcaagaccagcctggccaacacaacgaaatcctgtctctagtaaaaatacaaaaattagccaggtgtggtagcaggcacctgtaatcccagctacttgggagactgaggcacaagaatcacttgaacctgggaggcggaggttgcagtgagccaagaycatgccactgtactccagcctgggtgacagagcaagactctttcaaaaaaaaaaaaaattatagtaattttaacatgttcggtgttttctgtaattttgtcttttacactttttaaaatattattctgagaagaggtacataggcttcagcacattgtcaaagagggtcaagcacattatgagattaggagcccttgatctaaaggcagggagttctggaaagaggagtatagaagcctcaaggcagaagcaagctggcatgtccaatgggatagaggagcagaaggaaagctcctgcggccagagccaaagattgaggggcagagtggttggagacagaggtagggccagatcatgtgacttctttgaaagcttctgaaacttgcaaagggacctccacttccccactgcaccatacccacagagtgtgaaagtaggtattgtatgtaaattgtattttatgattttttggggtcattgytaacttttttcagttatcytggcagaaataagaaaattcttttttgctattccatatatctattgtgatatcagagtctgttgtttgtttgtgtgtttgtttgtttaagacagtcttgctctgttgccaggctgaagtgcagtggtgcgatctcagctcactgcaacttctgcttcccaggttcaagtgattctcctgcttcagcctcccaagtagctaggactacaggcgcgtgccaccacrcccagctaatttttgtattcttagtagagacagggtttcaccatgttggccaggatggtttgatctctcgaacttgtgatccgcccaccttggcctcccaaagtgctgggattacaggcgtaagccaccgcacccagccccagagtctgttgtttatagaggatgattgggcgtagctttctagagctgggaaaaccacctttmaacagtattatataccaatatttactatttcataaattcaggcatatttgcttaaaataatctcctgtagagaggcaagaaacagaagcccatttttttgtttttaggaaattcatagaagccwttggtaaggttcttttaagttggcaaactctattttcagaagacttctatgttgacacttgtgacctacagaattgctttaagaggtcagcactgataaaaacagagggaagctgtaaagggaggattaggctaaagtcaactggtggagtaggcataggtgaattactaaagtgttgatgaaatgactctgttggagttaccagtttattataatgagagctaaagtgaaaaacgccagacagcctagaagcattctgaataacaaggagctccaaccccttatatataaatgaggttacatatagtaggttgaaagcaggtttccaaaacaaccaattagtttgtatagcttcagcttcaggattgatgattacattccataggatattacattaaattgatgaaatctgcacgtctctggggaactccttacaagctagccagtgagcttttatgatgataagatacagaatggataaaaatcttctgatgccaaaaaagctttggccctgcccaagttaggatctatattcatattatcaccaggtaaagtgtcttgcaaactttcttagctttcattcctatcagactgcagttcatgactgtgaggtgtcaaagactctctccttaaccaagcttcagtcatgctctgctaatgtctcttttggaccaggcttcaagcttgctccacccccagctttggcttgcccagcccagccttagcaaggaattctgctaagtcatctcccaaccctagatatctaattacccttgatatctgatcaagttcttcatcctccacctttttgatgtctaagtccttggactgcctttagcaagagtcctgttaggccagcttagcaagaattcccctgcccttgatgtgttcttttagcaatttcccatcctttgacatcctcatgctgttcttggctataaatcttcacttgctcttgctgtttcagagttgagccccttcttttsccccctccaattgcaatggttttgaatgaagtcttccttaccattttaacaagtgtcagaataatttttttaacatctgtctttacaccacagtcaacaaccccttatcctccccaaaactctgagctaacgccactacttagagattacagtgtctgcctattttattagctggaactgcatcagtgattttggagttgaatttttcattttttacatgaaagattatgtgtttataatttgttgttttcacatatgcataaacagaactaggaagagctgtactcaggagtcaagtcagaagaaaaaacatcaccatgttcaaatagacaactgaacatgcctctgaaaaccagagacaaagggagttatttacagttaacatctatagaatatgggccgggtgtagtggctcacgcttataatcccagcactttgggaggccaaagcaggaggattgcttgagcccaggcattcgagaccagcttaggcaacatggcragaccccacctctataaaaaatttaaaaattagctgggcgtgatggtgtgcatctgtaggcccagctactcaggaggctgaggtgggaggatcacttaagcctgggaggtcaaggctacaataagctgtgattaaggcacctgggcaacagagcaagaccctgcttctaccaaaaaaaaaatatatattaaatttgtagaagtctgggcacagtggctcacacctgtaatcccagcactttgggggctgaggcagaaggattgccttcacgagtttgagaccagcctgggcaacatagtgaaataccatctctacaaaaaatacaaaaatgagccagttgtgctggtgtacacctgtagtcccagctacttaggaggctgaggtgggagaatcacttgagcctgggaggtcaagactgcagtaagccgtgatcatgccactgcactgtagcatgggtgacagagtgagamcatgtctttaaaaaaaaaaaatctgtggactatgaagcaagatgagagacatttgaaagcatatgtcggaaagtcaggtatacttctagagctggctctctgttaggatagagacctttaaaatgtttctagtgcttgcagatgtcaccctaccctcctgcaaagataacagtgcatttacttctgtcactgtagattagttttgcccaggtattcttttcttagggctgccgtaacaaagtctgggtggctttaaaacaacagaaatttatcgtctcacagttctggaggccaaaagtcagaaatcatggtgtcggcagggccatgctcccyctggcagctctagggaaaggcctttccttgccccttcctggcttctggtgtttgctggcaatccttgatgttccttggcgtgtagatgggtcacttcggtctttgcctccatggtcacgtggccatcttttccctgtgtttcttcacatagtcttcccatcccacatgcagaagtatgtgtcagtttctgtgtggctgaatttcccctttttataaagacagcagccctatcggattgggcctcctctaatgatctcattttaatttttgcctttgtaaagaccctgggagttaggacttcaacatgtcttttttgggagacaattgaacctacatagcatgtttttgaactttacatgcagaatcatattgtatgtagtcttttgcatctggcttatttcagtcaatatattagtgagattcatctgtgttgcaatagcagtttctattcattgtcagtcctacctaccactatatcaaggctctgcaaattatggtgtgaaggccaaatgcatcatgacttatttttttcgcatatggatatctaggtattacataagaaaatgtggtttttggtttctatgatacttcttcccatatttctctttgtttgaataggaaacaaatctaattaatccttaattaaaagaaaacttttatatcccatctttccatgactatgaatatgttacatgtataaatgtttatatctgttatgtggtcattatacattttgaactaaaacatagcttatacttgccatataagtttatggaaaaagttaaatattttacttaattgattgatttatatcctgtaactttacacataagtcctggtaatacaagcttgttgttaaaaaaaaaattgaaatgatccagaaggacataaaatcaaacgaataggctcctctccttatccctgtggcttgcccagtctaattctttataagtcaccgctattgacagttttctggatattcttacaaatattttttctgacatggaagtgtgcatgtatctgtgtatgtgtgtgttccctgtatttctaacatacctgggatcctaatatgcatactaatctatgacttgcttttyacatttaataatatattgtgactacatttccattttagtacaataaagtttctcctcattctttttttctgtttttgagatrgagtcttgctctgttgcccaggctggagtgaagtggcctgatctcggctcactgcaacctccgcmtcccaggttcaagtgactctcctgcctcagcctcccaagtagctaggattacaggcgcccaccaccacgcctggctaattttttttttttttggtatttttagtagagacggggtttcaccatgttggccaggttggtctcaaactcctgacctcaggtgatccacctaccttgacctcccaaagtgctgggattacaggyrtgagccacagcgcccggcctttctcgtttcttaaaataattttataatgttccgttcaatggatgcatgataatgtgttccccaaatagcaaacgtttagactgtttccaattttttgtgtaagtatacatggatttgtttctgtttctatttacttctatgaaaacatacttaagaatgatttttagatgttgaattgctgggtaatatatatgtgcttttaagtttttgacagataccactaaattgccattcgaaaaaatgcagtaacaatttacaccccatgaggtrtttttattattatttttaactaccaggactttacaccttgtaaaatctacaataagagagttatayattgactgtttactctgttgtttcagaacaatgagatggtggagctacagagaatacggatgaaggatgaaatccgagaatataagttccgggaggcacggctccttcaggactatactgaattggaagaagaaaatatcacattgcagaaactagtgtccacgttgaagcagaaccaggtaaggtttaagaaattttttgttatactgaagatggatctacatcttctgaccactagggttaaatctccaaacttgtcagaatttattgttactcttttatcttctctctataacatttatgtactgcaatgtcccaaccctcctatttcagctaaaatatagaaggaaaaaatacacctgtaagtagtatagtgtacactaaagtttyattgaataagaaaaagaattttagtttttattttagctctgtgttcatttatttcataagtcaaatgtatcgtaacaaatttaacctgacaacttytcattaaaagcctgagtcttagccgggcatggtggtgtgttcctgtaatcccagctacttgggaggctgaggcaggagaatcacttgaacccaagasgtcaaggtagcagtgagcccagattgtgccactgcactccagccttggtgacagagtgagactccgtcttaaaaaaaaaaaaaaaaaaaaaaaaagcctgggtctgtaagcttgtctatgagcttagggtctccctacaatcactggtctctcactcccttaaaattttttctgtaaattgctttcaaatcgtagaggggaatggattatgaagtwtaaatcaagaaragcaaaattayaagaaaaagaggccgggcgtggtggttcaygcccgtaatcccagcactttgggaggccgaggcgggtggatcacctgaggtcaggagtttgagaccagtctggccaacatgatgaaaccccgtctctactaaaaatacaaaaattagccaggcatgttggtgggtacctgtaatctcagctactcaggaggctaaggcaggagaattgcttgaacccaggatgcggaggttgcagtgagccgagattacaccactgcactccagcctgggtgacagagtgagattccgtctcgaaaaaaaaaaaaaaaaaagaaaaagaaaatgcctgttttctttttcagctgtaacctgactacaaagattacattcgtacatttaaatgatttttttgctgtaatgggggtttgatagcttaattttcctgattggtttgcattgtggattttcagaactattaataattattgaatctgtaattttagaagaatttatttatgaatacagttgaatcragtagttaattaagcaaaggtgaattggatgttcgagttcttttcaaggtgcttcctcagcgacacctctattctggtctaaacgctgttgccacctctcagttcagatsaacagcctatgtgccaggtgctgtgctaggttggacagacacaagaatccayagggcatgattcttgtcctctgtaaacttagaagccagcccagatgtatgcttttacctcactcccttcctgagttggtatctacatgatacactgattgattgattgattgatagatataagggttaagagggaaaagaaaaaaaatccagaagagaaaaatccatgtagtggcacaattaaaatttgatttcttttttttttttttkgcgacagagtcttgctgtgttgcccaggctggagtgcagtggcatgatctcagctcactgcaacctccacctcctggttcaagcaattctcctgcctcagcctccsgagtagctgggattacaggcatgagccaccacacccagctaatttttgtattttcagtaaagacagggttgtaccatgttggccaagctggtcttgaactcctgagctcaagtgatccgtccacctcagcctcccaaagtgctgggattacaagcacgagccacagcgtctggccaaaatttgatttctgatcattgccacttcccccagatttggagtgctggggggaaggcatgtaaggggacagtttcagtccatcaaaaaagggctactggagtatccccatgtgtttctgcctcattccttccgtaagcactgaatccccatatgtgtgctgagggctggccattccagaggctccccaggtcttgatttggctgggataagtgagctcacagtggagaaatgtagacttagaaaaatacatttgtaaagatgcttctcgaatactttttaaaataagaaggggtttttttttkttttttttttttgagagacggagtctcgctcygtcaccaggctggagkgcagtggcgcgatcttggctcactgcaacctctgcctcctgggttcargcgattctcctgcctcagcctcccgagtagctgggactacatgcatgtatcaccacgcctggctaattttttatatttttagtagagatggggtttcaacgtgttagccaggatggtctcgatctcctgacctcatgatctgccsgcctcagcctcccaaagtgctgagattataggtgtgagccaccacgcctgacctaagaagggtattttcttgtggtcctttttttggttattgatgaaacacatagaggatttgaaacaaatttacttgaagtgcaactatttaaagtggcccttccttccygattcctacactcctcactgctctctagagcatggtgagagcacgatcagcagcctccctggagagccttccctgaccgcatgtggagactgatggactcaggaggttaatgaaggccagtattagatattcttgaaagactgccaaggtatcccttgagtattcattaacccagatgccggttctgggagaatttgtactgtcattcctgttgtgagtttccccatgcccttctcccagtaattgaaacatggaatccaatggttaactcagaagttttttaaaaaggaggggggacttacacattttttatttccaacatgccatatgctaattttcccaattaagtatctaattaattcattcaaaatcattttctgcacagagcaccattctggtttattccctgaaattgggggaactgaaatgccacaagtctctcccagctaagaaaatgctgtgtttgtttccagtagtaactgatctttctttatagatgctagcatctatcataaactctctctaatcaataaagttttttggttttttggggttttcttgagacagggtcttgctctgtcacccaggctggaatgcagtggcttaatctcggctcactgcaacctccgcctcctggtcttgtgactcggcctcctgagtagctgggattacaggcgtgtgccaccatgtccagctaatttttgtatttttagttgagacagggttttgccatgttgccctccctatgttgcccaggctggactcaagtgatcgcccacctctgcctcccaaagtgctgggattacaggcatgagccaccatgcccggccctaattaatgaagtgttaagtacaatattgtatgtacaaatgccacagagttttttaaagagatgacaatgagtagcattcggtcacaaaattggactgtgttactttgtactgaagttcccaatacgttgtatagtccttcagcctggtttgatgtttctctaaacagcaaagctactaccattttaaaatgcttagttcaaagaattttcccttctgaagtattatttttcttttagttatttattattttctaagtacagtgtaattattgtttaaaaaacacctcttactttctataaagagtctatttattcatttgtttacattccatttccttccattaacatatagcacctacgatagagcctgatccacagtagatattaaataaatacttgttgaaagaataagaaaactggccaggcacggtggctcatgcctgtaatctcagcactttgggaggctgaggaggatcacttgagtccaaaagtttgagaccagcctgggcaacatagggagacctcatctctaccaacaacaaaaaaaattaaccaagtgtgatgatgcacacctgtggttccagctacttgggaggctgagatggaaggattacttgagcctgggaggctgaggctgcagtgagctgtgatcacacctctgtactccagcctgagcgatagagtgagaccctgtctcaaaaaaaaaaaaaatgggaaaaaaaaaagcaacaattcagtcacacttctaatatgaaacatttcctccaatgtcaggtaataatatataagaatatcmccctgggtgcaatggctgatgcctggaatcccagcactttgggaggccgaggtgggcggatygcgaggtcaggagttcgagatcagtctggccaacatagtgaaaccctgtctctactaaaaatataaaaaagaaattagccgggcgtggtgacaggtgcctgtagtcctagctactcaggaggctgaggcaggagaatcgcttgaacccaggaggyggaggttgcagtgagccgagatcacgccactgcactgcagcctgggtgacacagtgagactccgatccacctcaaaaaaaaaaaaaaaaaaaaagaggctgggcatggtggctcatgcctgtaatcccagcacttggggaggccgaggcgggcagatcacctgaggtctggagttcgagaccagcctgaccaacatagagaaaccccrtctctactaaaaatacaaaattagccgggcgtggtggcacatgcckgtaatcccagctactagggaggctgaggcaggagaatcgcttgaacctgggaggcagagattgcagtgagccgagatcatgccattgcactccagcctgggcaacaagagtgaaactccatctcaaaaaaaaaaaaaaaaaaagaatatcataaggtaatatcataaaagacctaggaaatgtattcagttgttttatttcatttaaccggtatttcaggkgtatctctctatgagatcatgtactttttagagacaaaagatacagtcactggctcaaagagcttgtagtcccaatagggactcctagcaatttgtgtaaatgaatattaaagccacatgttaggtttggcaacacagggatagattaagatctttagagttcctaagctctgaaaggattatgatatctaaccttgaccgtcatgtagttaaaaataaagttattaaactatgaagttgccataaggaatcctaataaagcacttatttttcctatggtgactgctttgatgttgtctttaaaatatcaaacaccagtttttaagcaccttcttgttccgtttcttgcttcctctgctttgctggggctctaatcacatggtgcagccttacaacaacggcacagaaaggagtgatgagtttgcctcagtgggcaccaaagacttcagttaggatgagattcttaacttaggtgttaaaagaggaataagagttttccagatgacagccttttcccaggcggagaaacatgaaacagctgggtgaatagtaggagcttgtaccacatttgagtgagtggtgtgagtgaagctgcccagacagaaagagatcagggccaggcacggtggctcacacctgtaatcccaacactttaggaggccaagtcacgaggatcacttgagtttgaaaccagcttgggcaacatagtgagacctcgtctctacaaaaaaamaatttaaaaaatgaggcgagaggatgacttgagtccaggaggttgaggctccaatgagccatgattgtgccactggactcctgcctgggtgacatagcaagagatygggtcttacaggaagtctaggccatcaattgaataaatactactgaattttaaactctgcagtgcaaactaaattaatgtcttcaagtcaagaccagagttagcaaactttttctgtgaagggccagatagtaagtatcttaggtttcataggtcacatgatctctcttgcgactacccagctctgctctggtagaagcagccatagacaacatgtaaacaaatacatgggagtgtgttccaatagaactgtctacacgaaaataggtggtgggctggatttgctccggaggacatactatttttttttttttgagacagaggctcgctctgtcgcccaggctggagtgcaatggtgcgatctcrgctcactgcaagctctgcctcccgggttcacgccattctcctgcctcagcctcccaagtagctgggactacaggcacccgccaccatgcctggctaattttcttgtattttttagtagagacggtgtttcaccgtgttagtcaggatgatctcgatctcctgacctcatgatcctcctgcctcggcctcccaaagtgctgggattacaggcatgagccaccgtgcccagccaggacatactattattggacaacctctggtctaggccatcagtttaacaaagattgcagcaaaacaggtctacaatgcaaactaaagtaatgtctgcaaatataagcttatcacataatctggggcagtcagagggttggttgaaatactaggaaaggttggcaagaggtgtcctatgttgtccagggaaagaaaaggaaagggttgagaggaagatgactttacagtattttttttttttttttttttttttttttttggagacagagtccagctcttttgcccaggctggagtgcagtggaagcaatcctggctcactgcaagctctgcctcccgggttcacgccattctcctgcctcagcctcctgagtagctgggactacaggcacccrccaccatgcccagctaaattttttttttttgtatttttagtagagacagggtttcactgtgttagccagtatggtcttgatctcctgacctcatgatccrcccaccccagcctcccaaagtgctgggattacaggcgcgagtcactgcgcccggcccaactttacagtatttaagcaggcctgaaagaaaccatgacacaaggaaacacactgctgtctgaagcaatttccaagttgcctttcttataaccacactgagggcaatccttgcttctcctttcataaggaggtaaaggcccttctgatttccatactccttcatcccaagtcacctgcaaagcagtaaatcatgttgagcatgcgtttctggattcctctcttcctccacacttcatcctcagtttccccctgcttcctggctaacaaattgagattcctataatcagagaatgaacctttcatttcactaccagagataaagtaaaaaatgcatgtttttgcttgaagtaacaayctagttgaaatgcagtcagtcagcaagtataaaggaaaggtgrctggatgctttagtgtgggaaaggttgtttgctcggtggaaaaggttggagagagtcagtcacagggcaggagcagtgaactcaaatgaccacaagcagcttataaatagcattaagtacaagatgtaaacaaaaagtagaggccgagtgcagtggctcacgcctgtaatcccagcacttcgggaggctgaggtggaaggattgcttcggtccaggagtttgagaccagcctgggcaacatggtacaaaaccttgtctctacaaaaagaaaaaaaaagccaagcatggaggtatgcgcctgcaatcccagctacccaggaggctgaggtgggaggattgattgagactgggagatcaaggctgtagtgagctgtgatcaagccactgtactctagcctgggcaacagagcaagaccctgtcacaaacaaacaaacaaaagaaaaagtagatggaaaaggaacagccagtgctcacttacaggtgatttttgtgctctgtgaaggtgggcccagtgttgcctgaattatttatttatttttatttayttatttttagacggagtcttgctctgtcgcccaggctggagtgcagtggcgcgatctcggctcactgcaacctctgcttcctgggttcacgccattctcctgcctcagccttctgagtagctgggactacatgcacctgccaccacgccccactaattttttgtatttttagtagagacggggtttcactgtgttagcyaggatggtcttgatctcctgacctcgtgatccgcccacctcagcctcccaaagtgctgggattacaggcgtgagccactgagcccagcccgaacttttgatttttttaaaaaagaaatcagaagttttcaaatgtttgtgaaatcatcagttttctaaatattggcaatcaattccaaaagttttataacgtgttacaagccaaataaagcacatctataggctcgatggtctatgggcaccccttgtgatctctgctttaaatcatttgatgtctgaattggtggaagggacacgggagcacacaccagcctggggagcccacyagagtacagaatgcaaactacagggacacatgcctttgagcaggtagtagatagccagggcctgtcaagttattaggtgtcccaggccaggtaataactccttggagttgtgaaaagtatatttcatttccatgccatcatgtttgtaacatgctatttatagtgcccagttatcatttttcccaaagtgcaatttttctcccatgaagtactcataatcttaagtaatgtagttgatatgtaacccagaaactcctacttgattagaagacagttattggtagtatgccattgatagatttgttaattttttgttatatttattcaaatgcatattcatggtagaacaattagcactttctagttttcattctaaataatggatattataaataatggtctccaatattgactcttttgagtaattctatcagggacatgttgaaattccaatgaccattttttttttttttttttttgccttagaggcatcttttgtacataatgtatttctttttttttttttttycctcaagacagggcctcactctgccacccagattggagtgcagtgacaccatcagggctcactgcagccttgacctccctgggcccgagtgatcckcccacctcatcctcccgaatagctgggactataggtgcacgccaccacacctggctaattttcytattttttgtagagagagggtttcattatgttgcccaggctggtctcaaactcctrtgctcaagcaattcaccgagattacaggcctgagattacaggtgctgagattacaggcctgagccaccgtgcccagtcctcataatgcatttcacacaccatagtgtggtgagcacattctttcactgaaataacactatccatattcacatatacaactggcattgttagaaacatctgctatacatatgtctttatgagttgcatcctattagagcaccacagtgtttcggtgaccagtgagtgctggtttaccatcagctttcattgttcccttctgacggtgtatttctcagttttttcctgggcccagtgctgcccagagtaaaggctacattcttcactcctcctcgcagccaaatggcataagactagtaccagccaatgatatataacaagtgatgtgggtaacttttaatgtccttaaagggagacagtgtgctccttattttgtgccaccrcttagaacatgatcaaatggcaagccacctgagatagtatggtctagactagaaggctgtacaacaacagaggaagagcctggctcctggatgacctcatggagcagagattccatgaggaatctcctcctgtctacctccatactgttacataagagaaaaacctctggctgggcgtggtggctcacgcctgtaatcccagcactttgggaggctgaggtgggtggatcacaaggtcaggagattgaaatcatcctagctaacatggtgaaaccctgtctctactaaaaatacaaaaaaattagccaggcgtggtgacgggcacttgtagtcccagctactcaggaggctgaggcaggagaatggcgtcaaccaggaggtagagcttgcagtgagccgagatcacgccactgcactccagcctgggcgacagagcgagactccgtctcaaaaaaaaaaaaatagaaaaagttccatcttgactaagtcactcttgcttaggtgtctgttacatcagccaggctacatcccaactaaatctctaccctaacctttgcgagacaaaccattgcattgagattatataaagggaagttgggggagaaagagaaatatatgatgatgatactggtcaatgttccctattcttcagtttttaaaatattttttaaaattcragttcaaactaatatatrtgctaaaataaatatgaawctragcacatagtktgtattagcatctaatatcatgatgactttattttactttttctactttattttttcattctccatagttctttattcagcaaatgcacattgaacagcagaattstgttttamacmccatgaaggaacwctgaagcactatgaggagcaatgaggtggataaaaaagtacttactttctctaaggagattacagtgtacttgtggagataaaatgtttcttaaaaggtggcatgtgataagtgccatggaaaggatcccaaggaggcatgtcggctcagaggagacatccctgtcacccgtgggccttcatgaccaagagattgtttgaggaggtttatttttattgcatttcaaaagaatattacctcaataacaayatatggccaggtgcagtggctcacacatataatcctagcactttgggaggccaaggccagaggattgcttgagcccaggagttcaagagcagcctgggcaatacagtgagaccgtctctacaagaaataaaaataaaaaataaaaaaaatagccaggtatggtggcacatgcctgtgatacttgaggagctgaaatgggaagatcacttgagcccgggaggttgaggctgcagtgagccatgatcataccattgcaccccagtctgggcaacagagcgagaccctctctcaaaacaaaccaaccaacaaacaaacaaacaaaagcaatgtaggtattttttgttactggatagtttatgtaactgttctttcagattctgtctatcctttaagcacataacaatgatctttgcattttcatcttactctcaaacattttactgagattatgttattataatcgttaacaaatttatctctgggtataaaaatttcctcattattaataaggaaataaaacaaagtaatggtgatgatacaatcttttcttagattgcaaatattctcataagttattacaaaaaatattccctatttattgggcaaacagtgcccscttttgaccactggatcctatgaaagaaatcctaagacaatagactcttcatctctgctaaaaattgaattatatagagagttatatagatgtatattattagatctaattatatataacatttatgttatatcactataatacctaattatatattttatatatggtatataatttctaaagaaactatcctatataactttaaggatatattgtgtgctttttattatttattttttagactcatgttgtattttgttaagtgattaggtccactagagtgtttaatggcagttttgtaagatccacattttagttttatgaatcttctttatcctgtctgattcaggttgaatacgaaggcttaaagcatgagattaagcgatttgaggaggagacggtactgctgaacagccagctggaagatgccatccgattgaaagagattgctgagcaccaactggaagaagccctygagactttaaaaaatgaaagagagcaaaagaacaacctgcggaaggagctctcccagtatatcagcctcaatgataaccatatcagcatctcagtagatggactcaaatttgccgaggatgggagtgaaccaaacaatgatgacaaaatgaacggtcatatccatgggcctcttgtgaaactgaatggagactatcggactcccaccttaaggaaaggagagtctctgaaccctgtctcygacttattcagtgagctgaacatttcagaaatacagaagttgaagcagcagcttatgcaggtaagaactttgtktagggccgctagagtgaatttcttgtagattgcaggtagcatgttgtgggacttctgattctcgcatttcacttctagatttcttttcttttttcttttcttctcttttcttttctgttcttttcgagacagagtcttgctccatcgcccaggctggagtacagtggtgcaatttcggctcactgcaacctccgcctcccaggttcaagtgattctcctgcctcagcctcccgagtagctgggactacaggtgcccgccaccatgcccggctaatttttttgtatttttagtagagacggggtttcaccgtrttagccaggatggtctcgatctcctgacttcgtgatccgcccgccttggcctccaaagtgctgggattacaggcgtgagccaccgcgcccagccccagctttcttttctaaatattgcttcttcarctagaaacttcgaaagtgcagtattttagaaagacatgacagaaggagcgttaaagagaaatgcagtctctcatttgcatcacttcaagaaatgaacttctgagagccacaaattgagctccaatgaagtctgagaaaagacagaaaaaagttccttgggccgggcgcggtggcttacacctgtaatcccagcactttgagaggctgaagcgggcggatcacctgaagtcaggagttcaagaccaacctggccaacatggtaaaaccccatcgctactaaaaatacaaaaaattagctggacgtggtggtgggtgcctgtaatcccacctactcaggaggctgagtcaggagaataacwtgaacccaggaggtggagattgcagtgagccgagatcgccattgcactccagcctgggcaacaagagtgaaacgtcatctcaaaaaaaaaagaaaaagaaaaaagaaaagacagagccttaatgcatttctgattaacaaaagaattcaaaagctttatatacaagtaaaatgatggaaaccatgcagtttttcatcacaagcaactgtgtttatagcttccagatttatggttacatttcacaggaatacttgaagccttaaaagacgtaaaggacttcctatgtacaaattatccaggataccgtatgattaaaaatacagaacaggtataatctaagaccaaaggattcttattgcaacatgagttaaaccttaaatttttagcrtcttcaaaacaaatgtcttgtgaagatcccagccttgaaaaaatcgctttctagtttagagtcttgccttcctgccacatgtaatggaaatgttgtttaagaaacagcagcattaccatcacctgggggcttatttatacaaattgtggagctccgtgtagatctactgaactagaaactgaactagaaatctggtataacaagcttgttaagtgattaaatttgaggcttaatcttcaatctcaatcttatctctccaaggttcttcatgtatagctgataattagaggctgttaagcctctggcagtcatctgcctccacggaaatgatgactggaaaagtgaaattagcagaaataagtaagagaacagagagccaatgatgttgatttgttaacaggtttattttctatgtctttttgctcagtttacactaatatgactagattgattgaaacagaaaacatatttccttgtgaaaaagttttacatgacagatgtattcataagaatttgtgccccccagattgaataccattaaatagaagttttatgagttttgtttaactctcatattggtggctttgagataaaaagttagtgggttcaggctttttgtttattccttttgttttggtggcagtgcagaagataataggaaaagaggcttctatgcatgaaacagcacaacaattttcaascaggtcatctattggctgaaagctcagagctgtgctcagatttaattctaaatgtgatctgaattgggtaatacaaaagtctaaaaaagatgaaaagttcaattaaaagaatggtggaaaacaagtaagtactcagctggagactggctctcctgagttctcaatagactgtcgttttcgtttggtttaggcggttcctcattgccagagaatgttttcttccttgagaaggtttagcgtctctgatcccaactcatgagatgctggttacatttcctcagttgaagtgatgaccagaaactccccatgtatttcaaatgctctgagagtcagccactagttgacagtcattcttagaggacagcactttactttcccatggaatgggatacataataccttcctcgttagagtgtcatgaaggtttatgagttatatgcagagtgctgagaacagggactagtgcacagtaaatgctcattaattatgaactgttatcattatttcaactccattggtcctttaatttattaggcactcactttataataatttagataattattattaactattatttttgggctattagctcaaggccaatcaccccaaaagggactgatgtggatactggtaggaatatagaaaaataacagttaagtctcatggtgcaagaaggtctgaaaaaggatattcatttagcaaaatgttagggtgagaaaaactttgctggataaaccctccatcagtctattgagaaagctgtgtcccttcaaatctttcttcaacccttaactgatgttgacagtttgcaaagatgtagaggggcgcaggtaggtccttatatcccaaagtttgctccagatttagttgtgaaaaccaggttcaacacaggaagggctttgcagcttccaatctcatactaacaacactaactgtaaatttttttttaggtagaatatccatttatcttcttgtaatcagcgtttttaaaaagcatgtcagcttttcctaagaatatattttattcaaacaagtatattcatgagaagtataccttctcatgaactatttttttgcaatacagttttttccttagccacacatctttttgggttaaatttatgtaaataaacacattacaaaaacattacaggatacattgcctagaatttattgtaattggctttgatgttaataaggattaaaaataatatggcaagtctgatcaatgagagtactgtgcacctgaagcatatatgtgtcagtaccattgttctggaaattatgaagaggaaccaatcaaatgtactttaagtatagctatctggaatgcttgggaccaggtgtgttttaaaaattcaggtttcagattgtagaaaggtaatatgcagcatataccacatagattgtgatatctccactgggatcagatgcagcatccggtgatcaaataatattaacatttctgcagtgaaacatgagtattcacactaagaataagatgaggaccattaaaggccttacaccagtcaggtgcagtttggctgccctgggagtttaggactgtctgaatactgccaagtgagttttatcataatcaagtgaattatgataaaacttgatttcgagctttttggattttgcagttgcaggcgttgtaggaatagcactgtcctgttgggcggctgtcagttttgcgcacctcagcttayagtgtcaacatacttggaacgtgacagtttgtattttcatttttttttattattattatactttaagttctagggtacatgtgcacaatgtgcaggtttgttacatatgtatacatgtgccatgttggtgtgctgcacccattaactcgttatttacattaggtatatctcctaatgctatccctgacagtttgtattttcatagttcctttatctcttaggatttctcctggcctggatccaaaacactgcatgggagaggccgccttgtgcctctaatccaacagctgtgcttagctaacagctcatgacagtgtagaggggcacaggcaaggctgtaackccctgaaccaggtgatatgcagcagttcaggttttcttccttctgatcaagtacccctttgatggagtaagttcaagagatctatagtacaacacagtgactgtagttaataacaatgtattgtattgaaaataaaagagtagattttaagtgttctcagtgttgtagaacccctaaatgtaggtccacgtgttggatgggcagtaagccaaatactgacacatcagtgcttagcagcagagaaaggtgtattcatttttccaaaaatgacattgtgggagaggcaatcggtcaaatcctacctgcctttgaacgtaactgggggtttttgtgagtaaggcagctgtgcaggagaatgaaatcccccaatgatcaaagttgtttgtgtcccgcagctcaatcagacttctggatgccatcaaggaggtctgcatgacctaaggatcattgttctttgaaaggaaaacaagttcattaatcttactggctgccagggttaggatgcaaagttaatcaattattagtgactaccgtctaccgaatgactacgtgcaagcagtcatgcatggaggaagaaaaggacaaagagaaaggaaaataagtaaaaaacaaacgtttaatgattttgataatataggctcagttacatcaccacaaacatgataagtatgtcaggtcatgcatgtcataattagctcaatttccactttgcctacatatttcaaaacatcatgttgtacatgataaatatgtacaatttttgtcagttaaaataaatacattaatttgtttttaaagaactcctttgaaaacagtatacctagtccatataccctttcggccttttcttctcctacaaggctcaatgtatgcccatgatttatgttttcccatccataggtatttatttaacctggttccaggaaaaaaaaatgcctctgtcgacgaagcaagtcaaactctgtaaaatattttaagagatttattctgagccaagtatgagtgaccatggcctgtgacatagccctcaggaggtcctgagaacatatgcccaaggtggtcggggtacagcttggttttatatattttagggaggcatgagacatcaattaaatacatttaagaaatacattgggccgggtgcggtggctcacgcctgtaatcccaacactttgggaggccaaggtgggtggatcatgaagtcaagagattgagaccatcctggccaacatggtgaaaccccatctctactaaaaaaaatacaaaaattagctgggcatggtgatgcatgcctgtagtcccagctacttgggaggctgaggcaggagaatcacttgaacccaggaggcggaggttgcagtgagccragatcgcgccactgcactccagcctgcgacagatcaagactctgtctcaaaaaaaagaaaaaagaaagaaatacattggtttggttcagaaaggtgggacagctcacagcgggggcttccaggctataggtaaatttaaacattttctggttgacaattggttgagtttgtctgaaggcgtgggatcaatggaaagaaaatgttcaggttaagataaaggattgtggagaccaagttttattgtgcagaggaagctctcagatagctgacttcagagagagcaggttgtaaaatgtttcttattgcacttagaagggtgcctggctcttagctgattatctcctggatctggaaaggaaggaaggaaaacaaagcggggaaaggggattytctacagaatgtggatttttcccacaagagactttgcagggcaatttcaaggtatggcaaggaaatatattttggttttctttctttgccagtatcagattggaaagtaactcttgatatacagggttaaataaaacgcatccgatgagaatttatggtttgtagggcatgaactccccagaccccttagataggaatttgggcaagataaaaaaaaatcagatcttagtcctcacctctgccttaattatcaggaatgttgagtgaattgttttgcttctctgaggctcattcaaaaggggaaggtaataaattagccccaccatttgtctctkycatgcctttgttggaactatggaaaaaacaaaacaaaacaaaacaaaaatcaggtctccttcttgaagccatcatactgccatctgctgggaaatggtaataacaagtataaacatttatagctactacaatttaaatagcacctcctggagttgtttgcatacaacctgcagacttctgcattgaagccctggtgataatgccatgcctcctctgtagaattgtgaggaccaaatgggatggtaaatatgaaactrtgtataagtcataacattttataaattattattgtcctggaaactgccatcaggtttcgagatgccaagaaggtccccactatccctgtgtataaacggtcaatacataaattataaaaagtatgggaaaggcaagtggtggtaagcctgtatctaaattagggagagctttttctcagaataaattagagtgaatattttactgaattgtatgccttcctaggttatggaataaaatacaggaatattttaaacttagctaatcatgctaagtttcacataatacagaaacatatacacaaaaaatacagtaagaaaacattttgattcacctcagtctctataaacttgacaatagtccttgatagtgaatagttcaatgagtgtcatcctttattcatgagagaagtttttcagagtattatcggataaattattttggttttttggtgccctcaagacctcattatttcaaataggttgtaattgacattttccagtggcagtcaaataccttaattagttttattagaatgaaaataagtagattctgtctggaaatactaactaaattacttaatcaatttaaaggtgtcctgtatgcttgtgctgaaatttctgtctttgataaatagcctctaactttacatctgcatagagtcaaactaagcaggggaaaactctttggatttttttttttcagtattatgctgggtatataatttcacatgtagtatgagaaaacagtaatgtttctgtaaaactaaaattaatatattctgttgcatcctcatggatgtggaagaaatatattcatattatgttttgatccactctattaaaggcaattttagttttttctataatgattgatgttaagtggtgatggtaatttgctatatgtcccataagagttcaaagcaatttttatatatttgcttaattggttgctgcttataacaactgtatggggtagagagtattattatcttcatattatagatagggaaactgaggcatgactgtgttatgtcattagttcaaggtcaaaaatctagtaagtggagttgctacacagagacagtcgaacaagtgaaatattatctctgcttaaasactcacagaatatttataggatgacattaatgaaaacaagattggttagttcttgggttctgaaacttaaagtgacaagtataattatttcctagtacaaagctgacaaatggctaaactattacagattttatagttagagattacaaactagctgggcgcagtggctcatacctgtaatcccagcacttcggaaggctgaggcaggaggatagcttgaggccaggggtttgagaccagcctgggccacatggcaaaaccccatctctaccaaaaatacccagaaaaaattagctgggcacggtggtgcgtgcctatagtcccagctactagggtcgctgaggtgggaggattgcttgagtctgggaggaggtcaaggctgcagtgagccatgaccatgccactgcactccagcctaggtgaaagagcgtgaccctatcaataaataaataaaataaaaataaatggaatcatacaatgtgtggtcttttgtgactggcttctttcacttagcataacattttaaaggttcgtccatgctgtaatatatcagcacttcattttcatttctttctgttgtcaaataatactccatggtatgcagataccacatttcatgtaaccattcatcagttgatggacactttagttgtttgtttttttagctattatcaataaagctgctatgaacatttgtgtacaagttttcgtgtgcacrtatgttttaattcccgggggagttaatactagaggtggaaatgctgggtcatatggtaattctatgttttaccttctgaggaactgctagttttgaaaacaaatcgagtgtaccattttttatccccaccagcagtgtatgagtgttccgatttctccacattctcactaacacttgttattatgtgccttttcaatcatagccatcctggtggatgtgaagtggtatttcattatcatcttgacttgtatttccttgatggctatgatgttgagcatcttttcatgtgcttatctgctcttttatatcttctgtggaaaaatgtgtattcagattattttttgactgggttgtctttttatttctgagttgaaagtgttctttactgatttggatacaaatccctcatcataaaagtgatttatgatttgcaaatattttctcccattctgtgggttgtcttttcactttcttgatggtgtcctttgatgtacaaaggagtttttttttttttaaaagagatgggtctcactatgttgcccaggctggagtgcagtggctattcataggcacaatcatagcacactgcagcctcaaacccctggactctcctggcctcaagcaatcctcccaccttagccttctgagtagctgggactacaggcgcatgccactatgcccagctaaaaaaactttttaatcttgatgtgtctagtktatttttttcttttgttgtttgtgcttttggtgtcatacaaaactgttgtctaatctaaggtcatgaacattcatggctaggttttcctctaagagttttatagtttatctcttacatttaggtctttgatccattttgacttaatttttgaatatgatatgaggaagagatcaacattactattttacacgtgggcatccagttgtcccagcaccatttgttgaaaagactattctattctttctttcccctattgaattatctttgtacccttgtccaaaatcaactggtcatagatgtatatatgggcttatttctagactttcaattctattccattaatttatatgtctgtttttatgccaatactatagtatcttgattatagtttttttgtagcaatttttgaaataggaaagtttgctagttctttttcaagaagtttcttcaggactgttttggctattctaggtcctttgcctttccatataaattttatgaccatcttgtcaatttctgcaaagaatccagctgaaattctgttggagtttgcattgaatatgtaaatmaatttgggtagtattgccatcttaacattcagttttttgacccagaaacaggggctgtttatccctttatttaggtcttctttcatttctttcaacaatgctttataattttcagagtacagatggtccttgacttgtgawkgttcgtctagacttttttatttaacaatggtgttaaagcaataccatttagtrgaaaccatactttgagtacctatacaactgttctgtttttcattttcagtacagtagtcaataaattacatgagatagtaaacattttattataaaataggctttgagtggggctgggcgtggtggctcatgcttgtaatcctagcactttgggaggctgagatgcgtggatcatctgaggtcgggagttcgagaccagcctgaccaacaaggtgaaaccccgtctctactaaaaatacaaaaattagccgagtgtggtggtgtgcgcctgtaatcccagctacttgggaggctgaggcaggagaattgcttgaacccaggagccagaggttgcagtgatctgagattgtgccactgcactccagcctgggcaacagagtragaccctgtctcaaaaaaaaaaaaaaaaaaggctttgagttagatgatttttgcccaactgtaggctaacgtaagtgttctggacacttttaaggtaggctagactaagctagaatgtttggtaggttatgtgtattaaatgcattttggacatgatattttcttttttttttcttttttgtttgagatggagtctcactctgttgctcaggctggagtacagtggcaygatcttggctccctgcaacctccacctcctgggttcaagcgattcttgtgcctcagcctcctgagtagctgggaatacaggcacgtgccaccacgcccagctaatttttttttattttttattttttagtagagacggagtttcaccatgtcggcctggctggtctcaaactcctgacctcaggcaatccacccgcctcagcctcccaaagtgctggaattacaggcatgagccaatgcgcctggccatacttaggatattttcaatttacaatggttttattgagatgtaaccccatcacaagttgaggagcgtctgtatacattttgcacttcttttttttttctttttttaaaattttattattatactttaagttttggggtacatatgcacaacgtgcaggtttgttacatatgtatacatgtgccatgttggtgtgctgcacccattaacttgtcatttagcattaggtatatctcctaatgctatccctccccactctccccaccccacaacagtccccggtgtgtgatgttccccttcctgtgtccatgtgttctcattgttcaattcccacctatgagtgagaacatgctgtgtttggtttttttgtccttgcggtagtttgctgagaatgatggtttccagtttcatccatgttcctacaaaggacatgaactcatcattttttatggctgcatagtattccatggtgtatatgtgccacattttcttaatccagtctatcattgttggacatttgggttggttccaagtctttgctgttgtgaatagtgccacaataaacatacgtgtgcatgtgtctttatagcagcatgatttataatcctttgggtatatacccagtaatgggatggctgggtcaaatggtatttctagttctagatccctgaggaatcgtcacactgacttccacaatggtcgaactagtttacagtcctaccaacagtgtaaaagtgttcctatttctccacatcctctccagcayctgttgtttcctgactttttaatgatcgccattctaactggtgtgagatggtatctcattgcggttttgatttgcatttctctgacggccagtgatgatgagcattttttcatgtgttttttggctgcataaatgtcttcttttgagaagtgtctgttcatatcctgcrcccactttttgayggggttgtttgtttttttcttgtaaatttgtatgagttcattgtagatyctggatattagatccagatttgtcagatgagtaggttgcaaaaattttctctcattctgtaggttgcctgttcactctgatagtagtttcttttgctgtgcagaagccctttagtttaattagatcccatttgtcaattttggcttttgttgccattgcttttggtgttttagacatgaagtccttgcccgtgcctatgtcctgaatggtattgcctaggttttcttctagggtttttatggttttaggtctaacatgtaagtctttaatccatcttgaattaatttttgtataaggtgtaaggaagggatccagtttcagctttctacttatggctagccagttttcccagcaccatttattaaatagggaatcctttccccattgcttgtttttctcaggtttgtcaaagatcagatagttgtagatatgcagcattatttctgagggctctgttctgttccattggtctatatctctgttttggtaccagtaccatgctgttttggttactgtagccttgtagtatagtttgaagtcaggtagcctgatgcctccagctttgttcttttggcttaggattgacttggcgatgcaggctcttttttggttccatatgaactttaaagtagttttttccaattctgtgaagaaagtcattggtagcttgatggggatggcattgaatctataaattaccttgggcagtatggccattttaacgatattgattcttcctacccatgagcatggaatgttcttccatttgtttgtatcctcttttatttcattgagcagtggtttgtagttctccttgaagaggtccttcacatcccttgtaagttggattcctaggtattttattctctttgaagcaattgtgaatgggagttcactcatgctttggctctctgtttgtctgttattggtgtataagaatggttgcattttgcacttcttttgttaaatttattcctgccgggtgcggtggctcacacctgtaatcccagcactttgggaggcctaggcaggtggatcacctgaggtcgggagtttgagaccagcctgaccaacatggagaaaccccatctctgctaaaaatacaaaattaaccaggcgtagtggcgcatgcctgtaatcccagctacttgggaggctaaggcaggagaatcgcttgatcctgggaggcggaggttgcagtgagctgagatcgtrccatcgcactccagcctgggcaacaagagtgaaactccatctgaaaaaaaaattttattctgaagtatattattttttgatagtgctataaaagcaattgttttattaattttatttttcatttttcactgctagtatatagaaatacaactgatgttcgtatattgattttgtatcctgccaccttgctatacttgcttattagtcctaatagttgtttcttagtgaattccttaagaatttctattaatatwtacaagagcacgtcatctgcaaataaagatcattttacttttttctttccaatctcaataccttttatttgattttctcacctaagttccctggctagaactctagtacaatgatgaataaaaatggcaagagcagccatccttgttttgctctgggtgtttcatagatgccctttatccgggtgagggagttttcttctatgactagattgttgacttttttttattatcacaaatggatattaaattttgtcaaatgctttttcttcatatattgagatgatcatgtggtttttgtcatgtattctattagtatggtatattatatttattgactcttgaatgttaaatcaacattgtgtttctatgattgcatttggttatgttgctggattcagtttgctagtattttgttgaggattttgtgtctatattcataagaggtcttggtctttagttttcttttcttataatatgtttctctgggagggagaggtcgtttgttttttagtttcgtttttttttcttttttgaaacagtcttggtctgttgcccaggctggagtgcagtgacgtgatcttggatcgctgcaacctctgcttcccaggttcaagcaattctcctgcctcagccttccaagtagctaggattacaggtgcccactaccacatcaggctaatttttgtatttttagtagagatggggtttcaccatgttcaggctggtctcaaactcctgacctcaagtgatcctcccgccttggtctcccaaagtgctgtttctctagttttggtatcagagtaatactggtctcataagagttgggaagggcccctctccctccatcttttttagtcttcgtccagttgactgacttttgtgtgttagtgtgcatgaattttcttttcaccacacactctaaagtagacacttttaacaactgatgaattccctcatatagagtttctttgttctatcttgatcttttttcatagaattatcttttgttggggcacagatatgcattatcagagttgtttctcttcaagcagagaagaacaaattatttaggagttccgtttgtgcatatcgatgctatgtatactgttagaagaatcacatgatcatttaagtgtcaaactgagagtcaaaagacttggctgggcagggtggctctcacctgtaatcccagcacttgggaaagccaagttggcaggattgcatgaggccaggaactcaagatcagtctgggctgcatagagagaccccatctctatttataaaaaggttttgaggctgggcacggtggctcacacctgtaatcccaacactttgggaggccgaggcgggcagatcacatgaggtcaggagttcaagaccagcctggccaacatggtgaaaccccatctctactaaaaatacaaaaattagccaggtgtgttggcacgtgcctgtaatcccagctactcgggaggctgaggcaggagaattgcttgaactgggaggcagaggttgcagtgatccaagatcacgccactgcactccagtctgggcgacagagtgagactccgtctcaaaataagtaaataaataaaaaataaaaggtaaacactcagtgaaataaaaaaaaattctatgggatataggaacaacaatgacaatagtaaacatatgttgtatacttacactagactaaacagttcacaaatactgaagtcaggttttctggcaaaacaaccagctctgctgtgaaaaaataaaatctccagttccagacagaaactgaagattgtaggaagagaaataagacaactattctcagtcactacagaagatcataataaactcctcaactctctgttggataaattctttacaaatggaaattaaaatagtaacacttaaaatgtatagtaattttaagctttaaagtgctttgcatgttattcattcagagcactaaatctaaaacaatttaggccaggtacagtggctcacgcctgtaatcccagcactttgggaggccaaggtgggcagatcacctgaggtcaggggtttgagatgagcctggtcaacatggtgaaaccccgtctctgtgaaaaatacaaaaattagccgggcgtggtggmacgtccctgtaagcccaactactcgggaggctgaggcaggagaatcgcttgaaccccggaggcagaggttgcagtgatccaagatcacaccactgcactccagcctgggcgacagagtgagactctgtctcaaaataaataaaaaataaaaggtaaacactcagtgaagtaaaaaataatttctatgggatataggaacaacaataatcatagtaaacatatgttgtatacttacactaaacagtttacaaatactgaagtcaggttttctggcagaacaaccagctcttctgtgaaaaaataaaatctccagttccagacagaaaatgaagattgtaggaagagaaataagacaactattctcagtcactacagaagattataataaacccctcaactctctcttggataaattctttacaaatggaaattaaaatagtaacacttcaaatgtatagtaattttaagctttaaagtgctttgcattttattcattcagagcactaaatctaaaacaatttaggccaggcccggtggctcacgcctgtaatcccagcacttttggaggccaaggcgggtggatcacctgaggtcaagagttcgagaccagcctgaccaacatggtgaaactctgtctctgctaaaaatacaaaaattagccaggcgcagtggcagacgcctgtaatcccagctacttgggagactgaggcaggagaatcacttgaacctagraggcggaggttgcagtgagccgagatcacrccattgcactmcagcctgggcgacagagtgagactccgtctcaaaaaaataaaataaataaataaataaataaaacagtttaagcatctgctctttgaaatccaaataccatttaaggtactctaagccttaatagctgagtgaaaatacagtgttggagttttacaaaattacctgtattttagtaatttttttgtcaggccaaacttaattatctgggagaaatatatatagatagatagatatgatatatttatatgtgtataatatatatttacatatgtgtgtaatatatatgtaatttggatacaatttcctattcaattgatttcagcagaaacgtattaaatatagaaagtagtactgtatagcagcagtccccaactttttttggaccagtgatctgtttcatggaagacaatttttccacagatagggtgcgggtggtctggggccattagatctcataaggagcttgcaacctagatccctcgcatgcgcagttcacaatagggttcgcactcctatggcaatctgatgctgccactcatctgacaggaggcagagctcaggcggtaatgtttgctcgcctgccactcacctcctgctgtgtggcctggttcctaataggccacaaactggtactggtcagaggcctgggagttggggactcctgttgtgtagggaggaaacacacatgcaagagacagtgttctatttgatgttttctggagatgctatcgtgaagacactgtagacttacctttttaggcttagaaaatgtttatattaaatctcaactgtcagagtccagattgaaggctgttctaaaggcatgaccttattcatcataacacttttgctgctaaaacaagcttcagacacattcagtacattttgttttgatccaatatttatttgatccagaggcytttccttttgaagggcgttttggaaacagccttatctgtaatcatgtgtactaattgaataacgtttacactttccagtgcaaatttgcttaattttcaaaggaaaaarggaaaacaaaaacacttctgacataatcagttttcactgagattgtatagaatagagattttccatctcctttatgaaaaattcaaatgacatggctattcatgaaataccatattacataattaccaggtttttcactgaaaactattgcccaaatagtctgggtaagcaaattcatcatcacctctggagatacagtctgttataactaatgaaatccagctaagatttgtattcaaatatttcctgactctaaaatgaaagagttgcttttataaaattttcaaaattgtgagaacagatgtgtttgccatgtaaaaacattttggttgtgggaggtggaccacagctaaccaattgttcacaatagctaacattgtagaaccttcagtattaaattcactaactcacttcatcatcaaaattccctatgaggcgttactgtgctccttgcataggttaccaaactgaagctttctcagagtcacatagctaagtaaatgttggtcccgagatttgactccagtgttctctgatgccacaggcccagttctttacctgcagtactatcatttgggaataatttggtttctgcagccataatatataatttgtgggttgctttcctttcataggtatggacaaacactatgtcataaaatcagagctacaacttaaaagcctctaaataacaccttgagataacaaaactgtatcttaggttctaatatatgtgatcatactatacaggcagtccttggtttgcatagtagtctgggacagtaaaaaatggtcrtgcaaactgaaaccatgcaaaacaaacttaataattaatggggaaatttacaattgttttgtgatctttaaatatttttgtgaaacattaaaaagtctcttactgttggttataaatatatatagaaatgaaaatatagtaaaactacttagtacttcataatttaaaacattaggaayattgagagttaaccttttatttctttgtaaacagcttatcaagagtattttgatcttgccttcccataaagcttagggccgggcrcggtggctcacgcctgtaatcccagcactttgggaggccgaggtgggcagatcacgaggtcaggagttcgagaccagccgccaggctgaaaccccatttctactaaaaaccccatggtgaaaccccatttctactaaaaatacaaaaattagccaggtgtggtggcgtgtgcctgtagtcccagctgcttaggaggctgaggcaggagaatcgcttgaacccgggaggcggaggttgcagtgagcgtaaatcacaccactgcacttcagcctggtgacagagctagactccatctcaaaaaaaaaamaaaaaaaaaaacttaggacactgagcaagaatcttttctatgctttggcaaattgtcatcctcatttctaagtttggatcaccttccaacattttatcctctgcactttaaacatctggaaatatctttgtgagtacctttaatgtgccagcatcacttcctcttcgacattttcatcctttttgcaactactgtactgtacttttctttttctttttctttttcttttgagatgaagatggagtctcactctgtcgcccaggctggagtgcagtggcacaatctcggctcgttgcaacctccatcccccgggttcaggcaattctcctgcctcagcctccccagtagctgggattacaggtgcgtgccaccttgcccggctaattttttaaaatatttttagtagagacggggtttcaccatcttggccaggctggtcttgaactcctgacctcgtgatccacccacctcggcctcccaaagygctgggattacaggcatgagccaccacacccggccatactgtactttttcatttaatagattgaaaaatttgcctccactaaatttctttgggtgmacatctaaagtccctcaaacagcattagtgtcaacatttccatattcagttatttcttctataactccatttaggtagttttggggatttttttagaggcagggtttcactatgttgcctcagctcctgggcccaagcaatgcttctgcctcagcccctggagtagctaggactacaggcacaccccactgcacctggctccatttatgttttttttttcagatttcatttccaacattgtcactctttgttgctgtcctttctttcttgtaattcatttttgtaaaacatcacatggatttatcactaggagacaagacaaggcaactacatccttagctgtctatgagtgaactgaataacagatacstagtaaccaatcactggccgactttgaatgaagtggtgtcattggccgttggtcatgatgttatgtagtgmttttatagactgaagtgctggcagcaaagattgtgcgttatgcattgctcacaatcaatrtatttggtcattgaaatttggaccatggtttgaggagtagctggtgttttaactaaagcatagtaactgaaacttacccatatyagaacctcgccaagagaggactaccatgaaagttaaatgaggggcattaggttccataaaggatcataaaaatactactctactctattatacatttacatatacacatgtgtatcctaaagtaataagctagttttaaaatattaaccatacttaatgattaatatttattatatctaattataataattttacttgccacctagggatttagaagagttcagagggatttaatgtatgatccaggaagtttgaaagtttgaattgggccaggcgcggtggctcacgcctataatctttgggagtgtaatctttgggaggccgaggtgggcrgatcacgaggtcaggagatygagactatcctggctaacacggtgaaaccccagctctactaaaaatacaaaaaaattagctgggcgtggtcgtgggcgcctgtagtcccagctactggggaggctgaggtgggagaatggcgtgaacctgggaggcagagcttgcagtgagccgagatygcgccactgcactccagcctgggagacagagtgagactccatctcaaaaaaaaaaaaaaaaaaaaaagaaagtttgaatagatactttcctttagatatgaagacattcagcatcaattcattgctcttaaagcagatctcatgatggtttattttttaaaaagaagaagaaagaaaagaaaacacaagtgcagaaggatatgaacaccatgatacttcttatagaacrataatgtaaacaatattatttggttattgagaaacatttacattataaatgtaaaaactcataattcataatattyacccatatggaaggagagaaaatggtttaaaatttttccacattgcaatttcttatatacctatgtttaatgagacagtattttatatggacacctgagtgtttttcatcacacggtaatacttacatatcacattattcaaattaattactaatatttaaaattcctattttggactgaaggaattgaattgacttataagttgttcttttagccctaaaattctgtatgtattctttgacttttatattagaaaccatcaaagctgggcgtggtggctcctgcctataatcctagtactttgggaggcrgaggcagggggctgacatgcgcctaggcattcaacaccagcctggacaacatagcaagactctgtctctacacacacacaaaattagccaggtgtggtggtgcatacctgtagtcccagctactcaggacactgaggtggaaggatcacttgagcctgagaggcagagcctgcagtaagccctgattgtgccactgcactccagtgtgggtgacagagygagaccctgtcttaaaaaaagataaaarctatcaaatrtagtgcgtgtttattttggggactaaatgcttatttttaaggggatggttaaagtactcagcattatttagggagttaaagccttaggttttaaacctgatttggggttgagctctgggaaggaaaagatgattgattcataggcaccctgatacagtcacttatratctgaaaagcagatgtactctaaggcactcaaaataaaaataacaccrgtcctatgcttatctcttaaagtcatgttgttttctgcaaggtgttaaaaatcaaaataagattgttctaataacattgaagtttcktcagtatatgtgtatgatacaagcgaaattgatgggtaactacttgcagtataattcttttagaattatgtacttttagattgacttaccagaactgctgaaataaaaaacactccaatttaatttgaaatagtgggaacattggctctgctgcagtgattttaagtgtatacatgcccgactgtgaatggattaagttcatcattggtgctgccttgaggtgattcagaaactttcttttgccattgcaggtagagcgggaaaaggccattcttttggccaacctacaggagtcacagacacagctggaacacaccaagggggcactgacggagcagcatgagcgggtgcaccggctcacagagcacgtcaatgccatgaggggcctgcaaagcagcaaggagctcaaggctgagctggacggggagaagggccgggactcaggggaggaggcccatgactatgaggtggacatcaatggtttagagatccttgaatgcaaatacagggtggcagtaactgaggtgattgatctgaaagctgaaattaaggccttaaaggagaaatataataaatctgtagaaaactacactgatgagaaggccaagtatgagagtaaaatccagatgtatgatgagcaggtgacaagccttgagaagaccaccaaggagagtggtgagaagatggcccacatggagaaggagttgcaaaagatgaccagcatagccaacgaaaatcacagyacccttaatacggcccaggatgagttagtgacattcagtgaggagttagctcagctttaccaccatgtgtgtctatgtaataatgaaactcccaacagggtcatgctggattactataggcagagcagagtcacccgcagtggcagcctgaaagggcccgatgatcccagaggacttttgtccccacgattagccaggcggggtgtstcatccccggtagaaacaaggacctcatctgaaccagttgcaaaagaaagcacagaggccagcaaagaaccaagtccaactaagacccccacaatctctcctgttattactgccccaccgtcatctccagtattggatacaagtgacatccgcaaagagccaatgaatatctacaaccttaatgccataatccgggaccaaatcaagcatctgcagaaagctgtggaccggtccttgcaactgtctcgtcaaagagcagcggctcgggagctagcycccatgattgataaagacaaggaagccttaatggaagagatcctcaagctaaagtccctgctgagcaccaaacgggagcagatcgccacattgagggcggtgttgaaagccaacaagcaggtaatctcattctactggtgaaagcatgccagtcaaagctttcttaactaatttattccctaattttattgagtatcgagtatcgtcragatgagagttcagattcttggtaagtggataaataaaactgtcccagtgccagatcagaatgtcataataattattgtttttaaatgatgaaatacctgtgcccagttaggtggaggcagaggtgaggaacttaaagcaggaacacaggagaagatctagatgcctttctgcagatgtagaaaggcagctcaggcggtgctgggctgaagcctggcagtgagtggctgtggaaacaggagatggagggtggcagaataggctggcaaggcaggttacaccaaccagggcgatacagcaagaaagacaaacacccagcaggcagctagagcaaacagagggaaatctgggtacatatggtgaagaaggtctgatggccaataactggaccccagctttggagctggaggttcagattcaagactcaatttctaggagtatagcaaaattattattattwttwttttttatttttgttttgagacagagtctcgctctgttgtccaggctggagtgcastggcgccatctctgctcactgcaacctccgcctcctgggttcaagcgattctcatgcctcagcctccgaagcagctgagattacaggcatgtgccaccatgcctggctaactttttgtggagacagaatttcaccatattgtctaggstggtctcraactcctgacctcaagtgatccgcccacctcggcctcccaaagtgctgggattacaggcatgaaccaccgcgcccagccaagtatagcaagattaaaaggagtgttttgtccttcatcccaaacttagagaaacaagagcgctaaataaatgaataagtcagggatgaaaggcaagacaactgtgaggacctgagtgagtaacagaaacaaagccagacagattgttaccaacaaattaaatagtttggggccactttagcaaggaaataatagagagtgtgtgtgagagagtataagaatgagctctacctgtgctactgaccacgtatctgaaatttaggttcatttgggatgttaacccacctgggtcagaggttaagtaatagggagcttttcctagctattgatcttgtccttctggacaagtagtaatgttacaacatgaacctgtctaattcccagccctccttaatgactgaaattgttttcaccctgagttttaccttggtgggagtgctgcgaaatataggcaggaaaattattttcacctttatttagtttatctgaaaagatattcttgaaagacacatatttgagaaaggtgctgaataaatgttggtgttgataaagagaagcaacaaagcaccaaataccctcctgcaaacgcaagcagtgccagtgaatagtaggtcaagggagctcttggtctttggagaatgaggattaatttcagattcagagtgtcttctccatttgccatcatctggggaaaaccacgcccttattatctcatctacagtgcagctttcaagtcctcatctctagttcccataaatctatttatataattgacatctataccataagccataatattgtttgcactattaacatgttttatataaacctaagggcaaaatatgactttattttatgttgtcactttagagaaatagaaaagattagagtgaatgaaaccatcattctcagcaaactatcgcaaggacaaaaaaccgaacaccacaagttctcgctcataggtgggaatcgaacaatgagaacacatggacacaggaaggggaacatcacacaccggggcctgttgtggggtggggggaggggagagggatagcattaggagatttacctaatgtaaatgacgagttaatgggtgcagcacaccaacatggcacatgtatacatatgtaacaaacctgtacgttgtgcacatgtaccctagaacttaaagtaaattaaaatatatatatataaaataaataaaataaaaaaagaaaagattagagtgaatgaagaatttgtgagagatctgactctaattttaggtcggaataaaggaatttattattrtaactctgctataatttaaagacccaatgattcagagtggtcataaataaccaataccatattagataaggcttacacaaggacatgctatcctggggcattcttgatcaagccatccagataacttctctgacttcttcctaaaggttgaatattaacaatttaggtctgggcgcaatggctcacgcctgtaatgccagcactttgggaggccaaggccagtggatcacttgaggtcaggagtttgagaccagcctgaccaacatggagaaacaccgtccctactaaaaatacaaaattaaccaggcgtggtggcgggtgcctgtaatcccagctactcgggaggctgaggcaggagaatcacttgaaccccggggggcggaggttgcggtgagcctagattgcatgattgcactccagcctgggcaacaagagcgaaaatctgtcttwaaaaaaaaaaaatcaagatgcttaactgaaacagaggtatagataaggacacttggccaaccaacagagactaatttgtgaacaagcattcattgattacatattttctgggaggcagtaagtagggatgcaaaaataaatgacataatctagtaggaattccgcaattgcctgtagctgtttacaagacaggacttatcaagcactttagagtgatgtaaacagtaccacaggaaatcagaacagaacaaagcattcctagctgaagttttattttcactgtgctttgtggtacaggttgagtatcccttttccgaaatgttttgggggacragaaatgtttcagattttggattttggacatttgcatatatacataatgagttatcttggggatgggatccaggtccaaacatgaaatttacttatgtttcatgtattcctatatacatagcctgaaggtaattttatacaatttttttaatgattcygtggctgaaacaaagttttgactgccactcatgacatgaggtcaggtgtagaattttgtggctcatgtcagcactcaaaaggtttcagattttgaagcrttttggattttggattaaggatgctcaacctgtaccatttgcattacattagagttacagtctatatgggctcagtaaattaaatgaaaacacatttctagcaatgcatttggtctgcacgttcatgatgttggggctgttgctgtgatgcttattgccgtaaatagcttcaagtattaacagatgacattcactatatttatttagacattgtgaaatgtttgtttttaaggttaaggtgagaattctggggtacaggggaaaaaaggaaatctccctgttttaaaatasgcattctactatacagccataagaaagaaaagaatgagatcatgtcatttacagggacatggttggagctggagaccattatccttagcaaactaacacaggaacagaaaaccagataccgcatgttctcacttataagtgggagctaaatgatgagagcaaatagacacatagaggggaacaacacacactggttcctgttggaggctgaaggatgagaggaaggagatgatcaggaaaaataacaaatggatactaggcttacakacctggtgaagaaataattggtacaacaaacccccatgacacacatttacctatgtaacaaacctgcacatcctgcagctgtacccctgaacttaaaagttaaaaataaataaataggcattctgtagtctctatgaatcttctcatttacttaaggattttttcataggcacagtgccttctgatgaagtcagtaaatgcttatgaagcaccgtccatctagcactgtgctagatgctgaagattcaaagaagactaacacatggtccctgccttccagaagactcagcctcctggggatgtcaggatagaaacacaattacagttcaacgttacacatgctgtaatccaagttatgagaacaatgcagaggaagcaactaaggtttcctagaggagcggaaaagacttcacagaagcaattataccttagtttgttattaaaggataagaagttgttttccagaggaggaggaagtaattccagacagaacagtaggtagagaggctttggagtgacaaaatagaataatatattcagggaatgctcacaaaggcctatgtggctggaaataagactttttttatttagaaagtcaactttggaatgtgtggagaaagtggtgaaagcagaaatcagcaaatccagtgagttatggatacttaaaattacttaattctggaaaaactttgcacagtcaatggacaaacaaatctacaaacaaaactgaggctttggggtatttgtcacaaacaataaatgattttgtatttctgtttcagatctagctcttctgttatcccccaytttattccccttagatactgaccatgggattctatgtgcttacaaatttgttacatctacatttcacaacttaaacatacttttctgttttaaatgaatatgtgtctaagctttttaaacactaaacaactgccgtttttccccaggtcaatttctgccttgtggataattttctgaatctgtaatatttctgaagattcctccaagtatttacagaacatacagaagtattttatgagtaaagtctcattttaatctgaatttaaatccaatcaaaactcacaagaaactacttcggaatcaaaacagtaacaaagtaccctatcccaacattgatttaattaagaaagaatttatttctatagatgttggcactttgcatatgaaggtttgaagctgcccatttcaagcaacaaaaagaaatgttaaaaaccaaggtagtsttcctgggaaatcccgttagtaatggatttctctgctagtaatggggttgttcattagtatggggtatttgtatacactttgaaaagttatagtttccagtttgtaaaaatcatgtgttcccagtttggcttcaacatgcaaactgtgtgctatgcatcaaacaggcaatccctaagtatacactgattttatgcattgattcagtcagtgtgtttttttacttgtgtgtgtgccagggtagctcttgatttgaaacactattaattccaagaacttcggacatgcccaaatcccagattcaaacaaatgttttaactcattcaacattttataacccctacttttatggagattttgaaggaattatatttcactatatttcattgtttggacaaattgtatgcaaattagaaagtaattagttctttatcacttcttttccttaaatgtatgataacatggatttatagtttatcatatactcatattataaattacaatggtgtatgtcttttattctatgttttgggcccacagagcacaggtgacaaaatttgagttctaacatattccaatttgattattccwattgaagctgtgcttctttactaaataattggtaaaaaaattttttttghataaagtttcattttggctccctccttgtcctaaaatcgcatactttcagcaatctgcattaaatatttattaaactactgtcattctcttagctcctgatactgactctggctcgcagcgggcttctagggcaatttaaccacattatgaattcacaacacattttgacattaaagaaaaacttccctgtgtccaaagcgcatacctatgtttatataaaatgtaaccaaatcaatttcactttccttttataaaagaacataataggcacagcatgaagcaatctgtatgatggattttcctgatatgaaaattgtaagcagtgtgattttctgctttagacagctgaggtggcgctagctaatctcaagaacaaatatgaaaatgaaaaagcaatggtgactgaaaccatgacgaagcttagaaatgaactgaaggctttgaaagaagatgctgcaaccttctcatccctgagagcaatgtttgcaacaaggtaacagtattttcttcctatgactgggtgtggtaggtggggwaaaggctttaaaattcacagccctgcctttgtgcatgttgagtgtattcggtgagtagtctaggatggctaagtgtgaagaaaatctgtggaagtccactctgacrtatctaaaagcaagccttctgtgctgttttccagagccccctactgaacactctggatccagaaattctattacataaaaatattttttaagtaagctaatattaataggttgtttctagaatttatgcaccccaaagagagtctccctccaaataaaaagctttcaataaggraaaaaaccccacttcctagaatagctaaatattatcacctctgaaatagagttctgtgaaggaagtacatgaaagtatataaaagtgccttacctttagtactgtgcgagaagatactgtcataatgaagattaataatcatcacatcagctaattacttataattttttttttttttgagacggagtcttactctgttgcccaggctagagggcagtggtgcgatctcagctcactgcaacctccgcctcccgggttctagcgattctcctgcctcaccctcccgagtagctgggaatacaggcacctgccaccacgcccggctaattttttgtacttttagcagagacggggtttcaccctgttagccaggatggtctcgatttcctgacctcatgatctgcccgcctcggcctcccaaagtgctgggattacaggcgtgagccaccgcgcccggctgtattttgtgtttaaacatgaagtgattgttaagaatgtatttgatttgaagttttcagaatcttgagattttcaatatactgttgaaatacattttttgctgtcacaatgcagtgtcaaaaaagacctacttttttttttttttttttgagatagggtctcactctgtcacccaggctgaagtgcagtggcgctatctcggttcactgcagcctggacatcctggactcaagcaatcctcccacgtcacctcagcctcccgagtacctaggactgcaggcttgcactaccacacccgctaatttttgtggtttttgtggaggcagggtctcgccatgttgcccaggctggtctcaaactcctgggctcaagagatccgcccacctcggcctccaaaagtcctgagatacgggtatgagccaccatgcccgaccaaatcctaccaattgtgtatcttgtatgatgcaaacttggtgcaaaattcacgaataattactatggctttacttgcagatttagtaaataatttacatttggctgatacatgtaaaagtgttaaaaacaaacaaaaaaagatctcttgagctttataggagtcccccagaaactgagatcacaccactgtactccagcctgggtgacagagcgagactccgtctcaaaaataataataattttttataaaaaggaattgttatccccaaattgtctattttcacagacttttttttggcatgaacagtatttgttattcatattttagcgggtaaataaactcagaaaaaaaacaaaacaaaattcagaatgagctttttctccacgccacctctaccttccaaatgtatatgtgccaggttttgcctttggtaaggaaaaaagatcactaagcttatctttcttcttcggcacaagtatgaaacctgaataaagatgtttcggacagcctgctgtatctgtatgaaaccttgtgaaatcttggtttttgcagggttttctgttttttgttttttgacaactcattgctctgtcatctggttgagaaatcattgaaaatactcagttttctaattcaggcaaatcagtcaaattgacaagaccaacagctgcaatctatactaaactaaaacgtataaatatagataaggaaatgttttctttataaacattattattttggatactataggcatagcctataataaacttgttacattcctccaaagaatacaatgtcatacagtaaaaagagctactgtaagacacttcaggtatagtggacattgtgtgagacttgactgttattcgtctgttacacagcagccccacgataactctgtccctggggtttaagacattgcctattaagactgtctccatatgggctgggtgcagtggctgatacctgtaatcgcagcactttgggagactgaggcaagaagatcacttgaggccaggagttcgagaccagtctgggcaacacagtgagaccctgtctctttaaaaaataataatgactgggcgtggtggctcatgccagtaatcccagcactttgagaggccaaggtgggaggatcacttgaggtctggagttcaagaccagcctggccaacatggtgaaaccccgtctctactaaaaaaaatacaaaaattagcttggcatggtggcacactcctgtaattccagcaactcggcaggctgaggcatgagaatcgcttgaacctgggaggcagaggttacagtgagccaagatcacgccactgcactccagcctgggcgatacagcgagactcagtctcaaaaaacaaataaacaaaacaacaacaacaaaataataataaatttttwaaaaatgtcccatatatctcattgtatggatgaacatatattccarttttctgctattgtgggttatctacattctattgctagacctttaaaccagtcttctaaatttctaaatttcrgtcaaatttattacttttcarcttaastcccaaattcagtttcaccaagattttcctctgaccacttctctgttttggttccagatgtgatgaatatgtcacccagttggatgagatgcagagacagttagcagctgcagaggatgagaaraagactctgaacactttgttacgaatggctatccagcaaaaactcgccctgacccagaggctggaggacttagagtttgaccatgagcagtcccgacgcagcaaaggcaaacttggaaagagcaagatcggcagccctaaagtaagtggggaggcatcagtcaccgtgcccaccatagacacttacctcctgcatagtcagggcccacagacacccaacattcgggtcagcagtggcactcagaggaaaaggtatgcatgcagcratcttcatagtacggtgcagtggccagattttagttaactgcaaaaataaatgtgctcttgttgtggaggatggaggaggggaavsaaaagaaaaaatgggagctggcatataaatggtcttgctaatgtgggtctttccagatcaaaacctttttgataattgtgtttatgtagtcctttctaaccccctgcccaatccctcctcttgattaatcgtaatataattttcaagtgtctgttaatatttttgctactctttgtatgtgtaaatatgcctctcccttacctccaacctgagaattggtagataaaggtggatattaagaatgaagctgtgttctacctgggttataattttaaaagtcattgtacctttggaaatggtgctgtttatcagcttctctttaacggggcaaggatatgaatatgttctcttagggaaacttttgtccatatgaccaaaactgatgacagactgaaaggggatgtctatatctagataaaatgggatggaatacgcacagtccttttcttgaaagcaggtttttgtgctttttcatttggcatgggaatattgcccagagaaaccacttgtaaggtttttaggggcttgattttgtgagtcctggctgttgagttacttaccctgtattttcggttaatggtaacatttttattttaggagctttcattaaagactcaaataatatattttctatttgcggttcaagctgactaactgtaataaatcttttttccagtatccagaacagtttccaaatagggttgtatcctgatgtggaaactaaaaaaaaaaaaagcaaaaagattgatttacatatttaaaaaattaaatgccartataaataatgttgtcactggtgaggcgttaaaaggtaattaaagtraaacttttttgtttcctatatgtatttttcttggatctcctgcaagacaattttcaccttccctttgtgatcagagccgtcccaggacttcaggggcttcctacctacagaatttattaagagttccccctgatcccacctccacagaatcatttcttctgaagggccccccttccatgagtgaattcatccaagggcaccggctcagcaaggaaaaaaggttaaccgtggctccaccaggtaaacattttttccttgggtgcatgtgatgcaaatgattagttgaatagactctycccttccttccggtcactcaggctcacccagctgcagagtatacctttgatgatgtgtaaattcctataagtcaagtaaaaacttccttacacttagcttcccatttcctccttcactcatattccttagaatgacagacttccatttaacagccaaagatggcaaatgagagttggaaggaatgggataggtaaagggaaattagcaacaagcacaacgcacacacacttggatcctatttgcagtttggtagctcatggcgattccatcttggtcagatttggccagttctctcttatcgtttttaatgtaatttccgtaaagggagagccatatgtataacaaggcttttgggctgatttccttttgtggtgactcagaacgtctcctcaatcattatattgagaataaaagtaaaaccttctaagattttgctcctcaagaacatttaggtcttagtataatgttcttgtagattgcaggccccccactggttaatgcttaccaacatgttcacacttagcttcactattttgcatttttctttcttccttccttcctttcattctttttacttgttctatgaagaggcctaacttgaaaatgtgacatatggcaaatagagaaaattattcttgcaaataaaaatcatccttttaaggaatccctgcatgtgagtatagggcagaagtggcaaacaaggagcccataaaccaaagtaagcttaaaggcagctgttatttgactattgccagaaaataaaaaataaaactatttaagttagttattgacagttaaaaattcaagagattttatatgaacatcagtatttctggcctcttttggaagattctgaatatctggcagccctaggtctgcgttcacgcatgtcaacacctgttggagctctgtagtggctgctgctgttagggcaagcttcgcactttgccacagtcaccactcctccttattacttatacccagcctgctatcctcatttctattctctcctggcccctcctgtagtctttgagtttgccaccgttgaaatagaattttttttttcattttaccttaattcctttttgcaaacctcagcctttggatctctaatactttccttatctgattcatgaagtcagcctactgattgggattaaaagatgtggtgtagaaactgatagtgcatttcacgttctaaaggtgtttgaggaaattggtagtgataatgagttggaatggtgtaatagccaaaatatacacctaagaagaaaaaaagtaaaaactgcttggtgtttttaatttcataactgatttcctattgttttagacctccttggaaggtaccttgaagtattctgtgaatcaccaaagtggtaatgatttatcaggatacctaactcggataaaacccacaagtcttctttttagtgttccaaatggatttagtagcactatctactggaacttagaaaagaaattggtatgattaataaataactcctattgctgtttaattaaaaagataacatctcaataaggttaaaaattaataatcaatgttaacaacaataactgttttcatttttgtatgactggtttttgtttacatgratatataytttatattgttatcattacattgtttaagccatgaacattatatcacaagcttttccatgttgctatctagtcttgtttttatttgttaaagttattgtatcatagattttgtttcagatgctgttatcacattaatcactacttctcttcttgtccactgaggtagtttttcattatttgttatattatagagcactgctgggaataccctcatgcattcagcttctcatctattacatttttctcaagagtgagatcactcagttaaaagttgaacatccttatgttttttgctccattctgatgttgctgtcaagaagggtatatcaatgtactaaaagcccataaaacactttccctttttcccacattgggaatctttctgctactttatccacactgtgcacatcttacaactctaaagtcagttagcatacatgaatgagagtaccatatattgtcttaaactctttagttttgaataaccagaaaataccattgaccttagaaatgattactatttatgagattcgaggccggctgcagtggttcacacctgtaatcccagcactttgggaggccaaggcaggtgaatcacttgggctcaggagttttagaccagccttggcaacatggtgaaaacccgtctctacaaaaattagccaggtgtggtagtgggcacctgtagtcccagctactcaggaggctaaagtgggatcccttgagacagggaggcggaagtttcagcgaaccgagatcgcaccactacactccagcctgggtgacagagtgagacactgtctcaaaaaaaaaaaaaaaattagagatataaggaatgtggaattcagaataatcaccagaccagaaggtcatgctaatgacagcttaacatattgataacctttataattctcaccatttatgtaaagttaaaataataaaagaggaaaggaagtaaagctgttattatagccttaggaatttttaattatgtatcgtggaatcaaccagattaacgcttagtaaattattatcaaatcaatcttagcaacattttctaaaaggtcctagttaaatgaattactacagaaagtgackgaccatccacaccaaataaattgtagcttctacaaatatctgcattattaccaatatatgttaytttccctcagctgaactatatagggtaagacatatcaaacattttttatgatgcttttactatataaaatcttttcaataagccaagaaagagaaaakatgacatataataccagtcttatgttctatataagaaatatcataagcccatgggaaatagtagattttatgagtatttttaaattcaggagtttaaccattataaaatttgctagctagtaacaatatctattaatcattttaaaaggaaaattctctattaatgtatcagaatgtttttgataagcattgttttacatatatatgtatatatatatgtgtgtatatatatgtgtgtatatatatgkrtatatatatgtgtgtrtatatatatrtgtgtgtgtgtrtatatatatatatatatatatatatatgtatagttttgggggtttgtttttttttctyttttttttgagacggagttttcctctgtcacccaggctggagtggagcggcgcaaccttggctcactgcaagctctgcctcccaggttcatgtcattctcctgcctcagcctcccgagtagctgggactacaggcgcccgtcaccacacctggctaattttttgtatttttagtagagatggggtttcacagtattagccaggatggtctcaatctcctgatcatgatccgccatctcggcctcccaaagtgctgggattacaggcgtgagccactgtgcccagcctaaaatatatttttagtacatctttttagatgatttttaattattctaataagcagatatgggctttatttttctattgaggaccattgaaacaattacctcaactaaaaatgaaatcagtttaatttgtttttaatccttcagttgaagaattgagagaggtatgtgtcgtttaaaaatttaagacacagaacataaaatgttatttattctgtacaagagttactttcaaatagattttatttctatgagatggtaaacagaaagcctcatctccttaaatgcacaatttctccattctggagaatcaactatagggtgrggcactgattttcaacattagtagaatattgtatagtaattgattaatgcattatactgatcggtttgctgcattagtacaaccttttaagggaaaattctggcgtttccctctggctggctcagcttctgcaacctcagcccttacaattgcagtgcttctggccatggcttgcttgttaactttcttgttcttgactttatccttatcctggcacacaaattccagtgtccttccacatgctcatcttagttttcacagtttcagttaccagctgatctgagaagtgcctatcagccttgatgaccttgactcaaaagggaccctgttgtcatcaaggagtttgtaattrgrcagcagattgtatgtcttcacaaaattgttgcctattttttagccagcattttatcttgactccttaactacctaggcctatatccttctcctcctcctccgtcccctcttcctcytcctcctccgtcccctcttcctcctcctcctcatcatcttaccatttaatcaataattgcaatcagcctgtcagaatacgtaaagggaatccatgtaattcacaggcgggagttgttatttctgtagtaaagacctgactgcagcatttacacatgataaataggaaatggcaaacctggggaagcaagtttgaactcaatctggaagtaatagcctaagcagcttgctcttcacactgtgtttcccatgtcacccttttcctcttaggtatcttgcttctccctctcatttcaatctcctccttccttctgttcctccatccttccatccctccctcctgtctttctctgacacaatgactcagctagtttaagagaatggtattattttgaagtctgaaaatgtttctgtgatattttgctttttactgatctttaaagcaactcacagaagtgtattagccttagatacgtaatcaccccttgagatatatagtcaacagtacacacygacatgttcatagtaaaaactgcctttatgtttcactgcattcaagcaagtagatatttgtttgtttcacgtattgcaaagcctatgttcttaagcatgtaccaaaatcacatttatttcattaatccatttactcattcaccagaatgtaacaaaatttagtgaatatctgctatgtgtcaggcacttttcttggctcttgatatacaatgatattcaaataaaactcatagtctggtaggggaggtaggagacaaatatgtactgatgttaatagatattcctgaaataaataaaggaattaggatggttaggaacgtccttccagaagaaatgcaaggctggccatgaaaggtgactatatcgtaataggcagaaggtggcagcgcaggtatgggtcgtaagaagaaccttataggaaaggaggtcaacttgccccagtgccatgagctcagcactacaacctggtgcaggacttcgaagtaatagaaagcgaggctgcaaaggtggacagggacctgaagacagagggccaggttagtgagagcagacttaccacgggcatagcttagcagttttaagaataggatcagattttcatttgataaaatcaccctgatgacaaggtggagagtggattagatgtgggtaacatcgaagataaagaagcaggtacagagactcataaaatatgcagatgagaggtagtggagaccagaatcaaaactgtgaggaataggaatgtttaaatatgtcccaagttacaattcagttacatatttcatcagccagcatgtcctgtgcacacacgacctgctcttactgctttccatgttctgtatgtggaaggagatcagtcaatcttgaactcatggcctcagtattttgtactttataatttatattttttcctatagaggcttttctatttatgtgtattccacttccccatatcactaaactgtctttttccacaggattcaattcttgaactagtaggagtgaagggcagtctgttgaaacctgtaatctcttaggcttgtattttctttgaacatagtttccacagaattcttccctgtaggggaaggcctgggcacttcttgatgtcagaacatgttgtctttagtttggaatctgccaaaacaaaagttaaatcaaaaatgttaattcctgtcaccccagcacttcgggaggccaaagcaggaggattgcttgagcccaggagtccgagactggcctgggtaacatagcgagacctcgtctctacattaaaatttaaaaattagctggatgtgctggcatgcactcatagtcccagctgctcaggaggctaaggcgggaggattgcttgagtctgggaggtcgaggctgcagtgagccactgcactccagcgagtgatggagtgagaccctgtctcagaaaaaaaaaaaaaaagaagaaaaaatatattaattcacaaaattgtcaaccacatgttgagaaatacatttttatacttgctgtatatttttcaataggtaatggttcaaaaattttaaagtacaaagggtatacagtagatggtagatttctgccacaactgtgcccacccaaccttttgtatttttccagaaacattctatacatatataaggaaatgcatataaatatatacatatataaaaacatatgcattttacatatgtgttaataccattggcacaaccacagacattatgcatgccggtttttttcacttgatgtatctgggttcttctttcctatacatttatctttttgtttcttttgagtcagaagaagttatgaaggggaaggaagacatgcttgagctctttaagaaagcttggaatgtttctatgtgtgcaatagaaatatttcttgccaaatgataaaatgacagctacaagaatgtttctattcagaactattcaatagaaatatgatataaaccatatatgtaaatttaaattctctagtagtctagtagtcatgttagaaaaagtaaaaagaagtcaggcaccatggctcacgcctataatcccagcactttgggaggccaaaatgaaggatcacttgagcccaggagttcaagaccagcctgggcaacatggcgaaaccatgtctctacaaaaaataaaaagattattcgggcatagtggcatgcgcctgtactctcagctactcaggaggctgagatgggaggattgcttgagcccaggagattgaggctgcagtgagccatgatcgtgcaactgcactccaggctgggtgacagagcaagaccctgtttcaaaaaataaataaaaagaaacaagtgaacttaattttagtagtagattttaattgacacactatatccataatgtgatcatttcaacatggaattcataggtggctaacacctataattccactttgggaggccgaggtgggtggatcccttgaggccaagagttcgagaccagcctgggcatcatggtgaaaccctgtctctacaaaaactacaaaaattagccaggcatggtggtgcatgcctgtagttccacctactcaggaggccaaggtgtggggatcgcttgagcccaggaagcagaggttgcagtgagccaggattgtgctagttctttccagcctgggtgacagagtgagaccctgtcaaaaaaaatatatatatacgtgtatatatatatatatatatatatatatatatatatatatatacacacacacacacgcacacacacacatacacatacatacacattctgtttttcttattcagtctttgaaattcagtattatgcacttacagcatatcttgatttgaactagccacatttcaaatgctcaacagcctaatttcgctaagggctactgtgttggacggtgcagttctagaacttcttagttttaactagatagaatttccacacagaaatctaaatttgaataactaatgactgattttaaaataaaatttaagatggcatgtatttcggttttatttcttttcttttctttttttttttttttaagacagaatcttgctcttgttgcccaggctggagtgcaatggcacaatattgcctcaccgcaacctccgcctcccaggttcaagcgattctcctgcctcagcctcccaactagctaggattacaggtatgtgccaccatgcctggctaattttgtatttttagtagagacagggtttctccatgttggtcaggctggtcttgaattcctgacctcagttgatcctcctgcctcagccttccaaagtgctgggattacaggcatgagccactgcgccctgccctcatttttcttttaaactgacatagaccaaagtgctattttgctgattctgctttgtctctgattggtggcagtgctttttaaaatagatacatattaaatgtttgagccaggcgtggtggctcatgcctgtaatcccagcactttgggaggctgaggcgggcagatcacaaggtcaagagatcgagaccatcctggccaacatggtgaaaccccgtctctactaaaaatacaaaaattagctgggcatggtggtgcgtgcctgtaatcccagctacttgggaggctgaggcaggagaatcgcttgaacccaggaggtggaggttgcagtgagctgagatcacgccattgcactccagcctgggcaacaagaacgaaacgccatctcaattaaaaaaaaaaaaaaagtttgtacctatatacccttttcatacatctcttatttgttactagatctccttgtcaatataaaaacttaattacttaggtatatcctaacaaaacatattccttaaacattcttaaaacagtataatgacttagttttttaattaccgtaatgaagttgtaaaagcccatgtttcttattttaagcagagagtgccttaaaaaggtttaaaatgcatcctgccagttttaaatagcagaatttattgataccatatatatagactgaaaacacatcaaagtctttcaaggttgattatttcttgtgccttccttcttcccacagtaagagagaagataaagataatactgagtaaaccattccatgctacaaattggacccattcgacaaaaatgcaatacttagtagaacatctgatgaccatggtcctattcgtgtttttattttgttttatttttgtttttgtttactgttctctcctctgtccagtattcctgtccagaaattacatttccttaaaagatttcatattcaaaacctgagcattgtatgcaaaataagctatgatgaaaggatgaaactttttaattactgaagagatcaacatgaaaaactctgtagcaagaatgtgtattttatattagatcatacttttcaatccatattgactattttagtaccattatgtaattttaaagtcttttagattttgttaaaattttattaaatccatggaaattgaaagttccttattttaatccttaggagaaaaactataatttttctctaatatatccataaagtgaaagaagaagtacttatttgatattcttaattgttacatatttaagagcaagagtaattagttcatacttatgttcacctaagtccacccatacattgctgaggatagcggccttcagaaggtggctgtttccggaggagtaacagggaggaacaggtgggctgagatatacatgaggcccaggacattccaggcaataactgtctgcctctcctgactctgcccaaacccgaaatgatgctttctagctcacacaaaaatrtatatatatatatcagcaggcagatactcaagctgaaagagacattactggggttcgtttctagatcacagatcctgcctcaggctcactgaagtgaccagcctccacccagtaacaacaaactagtctaaatccagaataaaacaattatacattttaatcttaccaccttctacctgtgtgtgctgtccaccctcaagacagagaatagcccgtattccaccaaccagcaatcactagcctacaacaccaaatccacagtttctttggtatcctttgtgccagggagttgggtgctgaacaatctacctgtaacattcccttgccttcatatcccaaagctctgcaagcaaagaagwgttctggtgggcagctagggccatttgttgtagtccagagraagagagccatccgtatcttctgtgctgtactcatacctatttaatccaatctgctggcaccagtctattatattcaactgtttgcccccactgtaactacataacaaccacctctattacaacagtgattataaggcattatctgagagggtatatccaaactgtaccttgcaaagggacttctatctgcaaagaatactaagaaaacatattatgagaaagtcacaataggtacccagagaagccaatctctaggttaaccaactacttccctgtccatttctccttataaatgtgaaaggagagcctacaatgaagaaatcctggaagggcatctcccagctctgagactctctgatgctatgaattcaagttattctgtccatgactgggtctggaggtcactgtgtaaaatctacgcttctaaataaatgttatgatatctcagcatactataccatacttataacatgtatgcttataacagcatactatwccatatagtatagttcccaagaaaagggaatgtttcttcccccctaaaaaaaggaaaattcccattatctaatatataaaacaaacttttttgatgatttaaagtgactgtgtgttgtgaactgagtagacaaggcaggaaggagtagtgatgttcctgagttcttgctgaattctgacaacgtgccaacactttgatttctctgtcaaaatgggtgggatttgatatctaaaaaagtataccattacatatctaaaagtatattgttacatggaatatggaagccactgatttaattctggaatgtccgtcaacatgacagccacctaaactcctctgaggcattgtaaacggttaggaaaattgacctttctacacactaaatctggcttcagtggctctcctgagctctaagggagttgggcaggggcagcctgagctccggctgtgagcatagctcaactgatgtgtagttagaatgttcatggaaggcccaggcttgctacttcccattcctttattttaaatgatgtagtgagccaggcgtggtggctcatgcctgtaatccccgcactttgggaggccgaggtgggtggatcacttgagcccaggagttcaagaccagcctgggcaacatggtgaaaccctgtctctacaaaaaawacaaaaattagccaggcatgatggtgtgtgcctgtagtttcaggggaggctgaggtgggagaattgcttgagcccaggaggtgggggctgcagtgagctgtgattgcaccactgcactctagcctgggtgacagtgcctacataaataaataaaaagaaagaaagaaatgatgtagtgaaaatatagttacatagcacttatacctagactacttaaagtgacctagtaattaaacttatatagctcatcaaccagcaaagattcctagtgcaccacactcgttatagagcagggaagcatcgctgccaccctcagggattcctcttgcatatctctgtgttctgtcctccacacacccatctctttagtcatctattgattttattcaattttcctggcagtttccccagtgtattttacctgaaaggtatgagaggaaaaaggaaaagcacaactcaaaatggttgactattccattctttgttttcttcaaaaagtgtaaagtcataaagatgccatagaaccactaaattcattgtcctttgtcacctctcagccaataatagtcattgatatactctccataccacaaatttaaagttttttgtgaactgtacatgcaatagccaagtttattttaactttagtcattactggatcccagagattttctttctcttttttggcatatagattatttatgtcacttcagtatgcccagtccacagatgagatcttctgagggactgcttctggagccggccctcttgtgtgattgaattagtcagtgatggttctcaggactagattagattgttactcttaaaataattacttaaaaaaaaaaaaaaaacttccataacttgaaaattttgtggccaggtgtggtggctcacgcctgtaatcccagcactttgggaagccgaggtgggcggatcgcttgaggtcaggagttcaagagcagcctggccaacatggtgaaaccctgtctctactaaaaatacaaaaattagccgggcatggtggcgcacgcctgtaatttcagctactcaggaggctgaggcaggagaattcgcttgaacctgggaggtggaggctgcagtgagccaagatggtacccactgcacttcagcctgggcaacagagcaagactctgtctcaaaaaaaaaaaaaaaaawaaaaaagaaaggagaaaaagaaaagaaaaatttgcatttaagacttatatgaaaatacataatttattttgyagaatgatctagagcaggactgtcattttaactaaagttatttttggccaggtgtggtggcttatgtctgtaatcccagcactttgggaggccgaggcaggtggatcacgaggtcaggagttcaagaccagcctggtcaatatggtaaaaccccatctctactaaaaatacaaaaattagctgggcatggtggtgcattcctgtaatcccagctactcaggaggctgaggcaggataattgcttgaaccaggacgcgggaggcagaggttgcagtgagccaagatggcgccactgcactccagcctggactacagagcgagactctgtctcgaaaaaaaaaaaagttggccaggcacagtggctcacacctgtaatcccagcactttgggaggccaaggcgggtggatcacaaggtcaggagtttgagaccagcctggccaagatggtgaaaccccatctctactaaaaatacaaaaattagctgggcacagtggcgggcgcctgtaatcccagctactcaggaggctgaggcaggacaatcacttgaacctgggaggtggaggttgcagtgagccgagatcgtgcctctgcactctagcctgggtgacagagcaagactctgtctcaaaaaaaaaaaagttattcttagtggatataaaaattggtgtttttggccgggcgtggtggctcatgtctgtaatcccagcactttgggaggccgaggcgggtggatcacgaggtcaagagatggagaccattctggccaacatggtgacacgcacctgtaatcccaggtactcgggaggctgaggcaggagaatcacttgaatctaggaagcggaggctgcagtgagatgagattgcgccactgcactctggcctggcgacagagtaagatgccgtctcaaaaaaaaaaaaaaattggtgttttcttggtttgttttgtgttttagtttaaggagacacatttcctcatcttaaggacttttttgctgctctgatgctggtcatctagtccattcttttgctctaaactgagccttgcctcccagttcttcattgcacttcagattgtgtcttactacaaagagaaaattagtctgtgatcagtttggatcagaagaactgaaawtgtacatttagaatagaagccagggatgtgatgcacacccgtgatcccagctactcaggaggctgagatgggaggatcacttgagcctgggagttagaggctgcagtgagccgagatcgtgccactgcattccggcctgggtgacagaacaagaccctgtctctaaaaaataaaaagaagaaaagaaagaaatttaaagtaggaagggctaccgtttgcttctggccaagcttcacctctaaccataggatcttttaaaagactagttctgaggtcctttactctgagtaggtatttatggaataagccattatgtattgacattagaatcagttaaacataaatttttttctctttttatgcactacttgacatcaaaagcaaaaagaggtaagttggctataaacctgtaggtgaacctaatttttcttagtagatttgttcctgagtagctttgcttcaattaaatttctgtgaatcaaatacttttacattaggaagattgtcattggaaattcttattcttttctttgaaaatgaataagcatcttctgtaaacttagattttcaagatatctagtatttaaacattttgcttttcctttaatcaagttatacttacggtttaatttgcttgtgaagacaaggcattttcaaacacttggtttagttttgagataactgaattgtttctcccaccagaaatgtggattacatgttataagtctttcctattttcttaaaaatgaaaaaaaaagccaagaaacaactgacattggtgaaagtctgtaattttcagatccattgatttacagaagaagatgccctgaacctctcagaatattttmtagtgtgattttttttaatgattaaaaaaaatgaagaaaatattaaacaagaagatcaaacacatttcattgagtggtgtctcatatgtttttcttgtttgggatctatttttataattgatctttttagtggattcttgattgtagtttaacttatttctcttttgtttctttttgatgatgcatcaattctgacatttcaaaggtacagctggtcttcattagatatgtgctgttattgactttgcttaacaagaacagaccatcatcgtaccaccttgagttaactctgtgccagctggccttgctcttgagaaggtcatttctaaacagaaggttattttttgaaagatttttaactggtrtaagaatctggcagcagaatgtacttttacctcttggtgccactgtatttaattaccctctccccatttatcctccatgtctttcctaccataagctattgataacacacatgctcatggtttaattgtaagttgttcagaaatagaaagctgactgtactgcagggcgtttttatatttctcttttgcaagatttgaaataaaaatagatttttgcatgaatattactttgttttatcagctagtcatctgatattcatcaggacagcaaatgggaagatgggtgaaaggttttgtcaaatctataaccactgaaaaatctaaaaatgctccctctctacttagcaaggcatgctctcattctacatcgctgaagacgactttcatgcttgtcactgaagtgtgatgaactatatgcagttgtcatttatgtgaaggaggaaccagatgctttttaagatttgtcaccaggtcttatttttgcattgtctatattgaaattttttgatgtgtttcaacaattccttctttttgttctctggaaatttttaacgaagaatgattgtttctatcaagagtatacgctataatggactttgctgtgttaaagactgatgtaaatatgtctgaagtgtttggtgatataaattagcagatttcacccgataagtcagaaattacactatcatctgtgggtacttttagaataactgatgttttaacaggggatgtaatacgtttggtgaaaagggatgagatagccaactctatgtgtttgattataaaatgctgacagtgcttcacagctctccatttttattcatatcagtgtaccattaaattcatcattagatttttgaaaatagttattttcctagctactgttaatatttatgtaaatgtttctatctcatgctcttcttttatatataatatttctttctcagtttttccttattatttctaaattctctactctatatgtgtgtttttcagtttatttgtttaggaattcataggactgtttaaatgttcaagttgttactacaaggagaatgtattttgatgcttctttccattaacctttctgttaattcactaacattattaatcattttgtagatttagtgaggaataatttactggttatgttatttggcacatcttaaatgatggcaatttaaaaattattttcaagacttatatattaaagtcctacagttaccaaagaagaataattgatcatctgataacactaaattaaccttaaaatctttatcagataatatttatccattcttattccttttgttagaaagatgttgttacaatgacagggatgtctaaattgtaaactctcctttcaagtgaattaattaaacagtgacattgatgatactaataaataaatccaaggattttttttaagggaggtggtttgcaccacataaattccctagcaaagtgttgtggggaattraagaattataaggcagggtcctgcctgctctcaaggagctgcatagtgtggctagagagaatagatatactgcaagggaagcaggggtctagaattctgtaagaaatgccaaaggaagctgggcgcagtggctcacacctgtaatctcagcactttgggaggctgaggcaggcggattgcttgaggtcaggagtatgagactagcctgggcaacacggtgaaactctgtctctactaaaaatacaaaaattagctgggcgtggtagcatgcacgtgtaatcccagctactcgggaggctgaggcataagaatcacttgaacctgggaggtgaagattgcagtgagccgagatggagatcacgccactgcactccagcctgggtgacggagcaagactctgtctcaaaaaaaaaaaagaaatgccgaargagatgagagaagtgctaaaggagtttgcaggaagcagacacctccttttgggatggccagaaataatgactgaaatttgactttgcatagtctgatagacaagagcatttccgatgaatataatgatagcttgttgaaatgaatttctcctatgatccattttgacctttcttatttccttgttgttaatagcatttactttgtttctcgaagctgaaaaccttaagggccttcgactcctccctttcctttgtccatcatgtctaattgatggactcagagctgcatgctttcacaaacattctctcacctgatcttcacgtgaaccctgcaagattggtatttaatgttctcacttaaacggatagaaaaactgaggctaagaacagttaagtcacttcttcagtgtccctagctactggttgttggaactggtatctaaaagagagacagagatctttctgatggactctaaatttcatgctgaaatggagaagagctgaagagcacagaggagagagaatagagaataaagagggccaggcgcggtggctcatgcctgtaatcccagcgctttgggaggctgaggcgagcggatcgtttgagtgcaggagttcaagagcagccttggcaacatggcaaaaccctgtctctacaaaagttttaaaaaattagctgggcgtagtggcactggggaggctgaggtgggaggatcgcctgaacccgggaagcagaggttgcaatgagccgagagcacactactgcactccagcctgggtgacagagtgagactccatctcaaaaaaaaaagaaagaagaaagctgagatgccataggaaatggctgcagaagcatcattggcaaatgcaaggaaattattgtgatgtaccctcacttaagactccagtgcatctaagtgtgttagtaactgattatggagagcacctttgtgctattatcagaattcctgggtgtgggaaacttytataactgtgcaacttttctatctccacgtcagtgcacagtatatggacatttatattttctactaacacaactgacattccactcccgtcagtttagtttcccccagtaccactgttttgaccactttcacacttctgtctatagtgcttttgctaagaaggaatctgctaaattcgaatgcagattctcctgcttttttttttttttttttgatggagtttcgctcttgttgcccaagctggagtgtgatggcgcgatctcggctcattgcaacctccaccccccgggttcaagcaattcttctgcctcagcctcctgagtagctgggattacaggcgcacgccaccacgcccggataattttttgtatttttagtagaaatggggtttcaccatgttggccaggctggtctcgaactcctgacctcaggtggtccacccaccttggcctcctaaagtgctgggattacaggcatgagcaaccacacccagccccagattatccttcttaatttgtgcttcttgcctttcgtatatatctttttcattttgagtttccttgaattaaaactttttaattcaactcttggattgcttarttttgaataatttgagagaatttgggctgttcttggtttatttagactgaagaagtactctcggcagagtaagaaggagcactaactgcttctactttggagcaagtatcaaaggctgtgttagtctgctggggcttccatcaygaatgaccacagactggatgccttaaacaacagaagttaattttctcacagttctggaggcccgaagttcaaaatcaaggtgtccgcaggtctgttttctcctgaggtctccgtccttggattgcagaaggccaccttctcactgtcctcgcatctctgtgcactgcatccctggtgtctctctgcatgtattaatcctctcttctttacaaggacaccaatcagattggattagggccaactctaacagtgtcactttaatttagtcacctcttgtaaaggtcctgtcttcaaatacagttgcattctaaggttctgagagttagggcttcaatatatgaatttaggggaacacaattcagtctataacatcatgggccattccactgaaagggcgtgggtggacagtcagaaacctgggcacaagttctcactctgccactctctccatgggccctaagaaaatcacttaacccttctgatcctcagtgttctaatctgtaaaatgggcattatgactaccaatctcagttgagtttggtttgtttgtttgtttttgagacagagtctcgctctgttgctcaggctggagtgcagtggtgtgatctcagctcactgcaacctccacctcccgggttcaagagttctcatggctcagcttcccaagtagctgggactacaggcacgccctaccatgcccagctaatttttgttaatttagtagagatgagttttcaccatgttggccaggctggtcttgaactcctgaactgaagctatctgccagcctcagtttcccaaagtgctgggattacaggcatgagccactgcgcctggactcacttgagttttctaggcactaaaaagcttttgttcattataaaagccatacagaggccaggcacagtggctcacgcctgtaatcccagcactttgggaggctgaggcaggcggatcacgaggtcaagagatggagaccatcctggccaacatggcgaaaccccgtctctactaaaaatacaaaagttaactgggcgtggtggtgcatgcctgtagtcccagctacttaggaggctgaggcaggagaatcacttgaacccgggaggcggaggttgcagtgagccgagattgcaccactgcactccagcctggcgacagagtgagactccacctcagaaaaaaaagtaatacagaaagtgaccttgcataaacttagtttctcatttctaaacaaaaataaaatgtatctcatagagtttttacaaggattcaagagcttttgcatgcaaattgtctgcaaatatatatatatagcactttttataagcattacatattaccattatttctcatccttctttcttctacatttcttctgcccgctcttccttttctgtcattgcctaaaatccctattaatgaatagtttgaaagaacatggccaggtttgcagaaagaagaaagagagatatccttttccctcccataaggactaaaagaggatgtctctgtgctttgatcattaaccatggcgtgttgattttaggacaatctataactctctgtcaatttcctacttaacagctttcaaaattaaatgttcttgcttttctactaactgttaatcatctgttcttattgaaaggtctttaatgaatattgactgtttactccaagtttataagatttttggtctaaagtggttgtcttagtccattttctgttccttataacagaatacttgaaactgggtgatttataaagaaaaggaatttgtcatttgcagttatggaggctgagaagtccaaggtcacggtgagagccttcttgctggtggggactctgcagagtcccaaagtggtgcagggcatcacatggcaagggggctgtacatgctaagtcaggtctgtcttcctcttatagagccaccaatttcactcccatcataacccatgaatccattaacccatgaatccattaatccatgaatggatttatccattcatgagagcagacctttatgatscaatcacctcttaaaaagttccacctttcaatactgccacattggagattaagtatcaacatgaattttggaggggatattcaaaccatagcagtggtatctatttaaatctatttactttcaaatagataatagcagcatgttctatgatagcaattgttcaaagaaatttattaaaccttttttatagacagtcttgggaagaatacagcaagttagcaaagataataactaagagtctcatcaagaggcgtgtgtgttccttatatcatcaacttccatttctcctgcctatttttaaggatatgagtatgtgggctgggcgcaatggctcacacctgtaatcccagcactttgggaggccgaggcaggcagatcacgaggtcaggggatcgagaccatcctggctaacacggtgaaaccccgtctctactaaaaatacaaaaaattagccaggcgtggtggtgggtgcctgtagtcccagctactcgggaggctgaggcaggagaatggtgtgaacccaggagggggagcttgccgagatcacaccactgcactccagcctgtgcgacagagtgagactccatctcaaaaaaaaaaaagaatatatgagttgcccattttcaaaacaggaaaggaaaagaagaaagcacacgtccctttttttctcacttgttgaaggaaagagactgaaaaatcatgaacttatgaaagatagaggaagaggtgcctaaggagaaagagaatatttaagtaagaggattaatacctatatatgtcagaagaagaaatgtagaaatatagtttttacacggtggaaaagaaaagtttctctaaactgtagaccaacaaactttgcctcatcctcggcaaatttctggaaatggatgaattacaaatgctctctatagaatggggattgttaaaagccagtgtgagttcatcaagaatgacttgaactggactacccacattctctatctcataagaccagggaaatggtaaaataatgtgtctgaacttgggcaagcaattaaccaggcatttttttttaatattcttgagacaaatagagaaatcaattctagaggataatataattgtgtagactcataactaattgaatgatatgtgcaaagggtccaaattcattgacttatatttatgaaatatggtcttcacttagcctgaccttattattaattgctaatcttacataaagctatcgaggtcatgattctcatattttctgatttaagagagaaataaatgctaaatgayggaataggatccaaaatattcatcagataggaagaggcgaaatatttcacatgtattttaaacataaagtttaaatggatatgaawtattgtgctggaattccaagcactgtaagatggaggaaaaatgactttatagcactacctgtaaacaaagctcaatggaaatagcagtgtgatgtggctgcccaaaaatgccatgaggtttctgctgttttaataggactgggatgtctcagataagacaagacagtgccactgtactcttcactgggcatatcttaccacacatgatttcctttcttatcacctcrtttttagaaggatgtgcacaaaccggaacaaggtcagagagcaaggagacgagtgagggaaattgacatcaygtcttaaaaggaagaaatggggttgggcctgatggctcacacctataattccagcactttcagaggccggggcgggtagatcatttgaggccaggagttcgagaccagcctggccatggtgaaaccccatctccacyaaacatacaaaaattagccaggcatggcagcacatgcctgtaatcccagctactctggaggctgtaacacaagagtcacttaaacctgggaagtggagtttgcaatgagccaagatcacgtcacttcactccagcctgggcaacagagcgagactccatctcaaaaaaaaaaaaaaaagaaagaaagataagaaaaaaaggaagaacttggatacttggcctgaggagaactcagaggacagagatagttttcatgggaacacgtggagcatccggaggttgtttatggtcatgagggaaagagatgtggtgtggaaaatacgatcttgtgaaaaagtagggatgcattagttctcaagtcaggaaaatgaggaggtggagtcaagcgatgctacaggagactgtttgccacaaagagttgctgctgtgcctgccccagagcacttgggcccaaagaagccacctctgcagcctcactactcatcgtggctgggtttggtctccacagatgggctttcactcacatggtgctcaccagtgcccactgctgccatctgggccaggtgtggagccaaaacatagaagtgttccttgtctcctacatgagctgttccttcccatcccaaacagccaccagtgggctcctggactccctaaggcattgacttttagaaaattgggtagtttggctgggcgcagtggctcacgcctataatcccagcactttgggaggccgaggcaggcagatcacctgaggtcaggagtttgagaccagcctggccaacatggcgataccccatctctactaaaattataaaaattggccgggcrtggtggtgcatgcctgtaatcccagctacttgggaggctgaggcaggagaattgcttgaacccgcgaggcggaggttgcagtgagctgagatcatgccattgcactccagcctgggcaacaagagcgaaactctgtctcaaagaaaaaaaaagaaaattggttagttttctaaattgcattgaaaattttataaataatagaagcccgagagaaagccacacagcaaaactttctctctctgccaatgaaatgtattattttcagccacctctttttaaaaacaatattatcttcattcctgtacccttcattttgctttgtatttttgagagcgctggttgccttaaaatcagtatctcaaatctctggcaaagttccttctgtttctttgactctatgaccctgatattttctagaggtagctggtgtcaatttgagaagcatccagaggagtgaatagaaaagaggccttagcattaaaaagactaaatttaaatccttgttccgccacttcctaactgtgtgaccttgggcaagttaatacacatgctgagcttggattaatcartggaggcttgtaggacacctactgtgatggcaaattctgtgtttgtttctagcaggagagattttaaaaagaagttaaagaaaaaaatatgtgagactatgatattctcccatattatcaaaaacacttattttcctcaatgtaggaatagtgcaagcctgtcgacccagctattttagaggctgaagtgggagcatcacatgagcccaggagttcaagaccaggctttaagagaccctgtctcttaaaacagataacaaatgtaaagtttataggaaagattacatcatgttgattcagcaaatattttcctctcttatttctccctttcttttctatcttcccttctacgtgaggcccttgtttatggaggaatgtcatacaagggtactcttcttgtgcatatcgagacagacctatagatgctttgagctataatattccatattcatccctgccctggaggcattagtaatctcttgagccaggcacagtgtacacacttgtagtcccatctactcaggagattgaggcaggaggattacttgaactcactgcattacagcctgagcgacatagcaagacctggcctctaaaaaaaatacataaataatctcttgagtatgctatgacatttcccaagcctgtggccttatcatataaacgtacagcattttctaattccattctgatcatttcaaataaacactttaattttatgataaaatgtcttattactgttactaaagaccataaaaagtttgtagttacaaagaagttatttgactaactcattatgttagatgtcagcctagatatcacaacctccaggaagcactccctaaccacttagatttagttgtgtttggttagttagatttagttatgtttgattagttagattcagtctaatttaatttaattaacttccgctgtgaggtcctgtaacaccctacactttccctatcataggaggcaatacagtgatacttctgcaagttcagctcagcccttggaccatacaatcctggattcaaattgcacctctacctcctagtggagtttgtcaagttacttaacctaagttcccctttccttatagatgaagtgagattaataaaacagggttatagaagagcatgtatattaagtgcctatacagtgcctgagacatcgtaaacaataaataagtactagatgctgtcatcatcaccatcaccatcaccaccatcatcaccatcaccatcacacttcaatgtagttgcttaytaaatatgcttatcttccttgataaaacagagaccacattttctctgttcacctttttccccctgctgcctaacacagtttctgacacaaaataggagtttagtaacttgactgttgaatggtttagacaaaccctggtggccaaacaacagcaatggctttgtgggttctacaatgcctgctccttcatgcacatagttgtcatcttttattccccccaaagcaacgagatgtggtctagttccttcaagggtgagcctagcagaatagatcctagacggagcaggggagatcactcagagcctgcagcatctcagagctacaagggacttcctcagcctcccaacctacctccttcattttacaaagtacatcctaagacacatccgtggctcagccaggctacaattgacacaactggagggctgtagacccgagaagagggatttagaagacaactgagtcagagcaatgtagctacattttagtttaattttttaagtccatcaccattttatctatgaaatttgttttttattctttaaggataacacgtagctaagtgcttataaataataaatgaaaaataatcatcattagcttggctaggagcagtggctcacacctacaatccccacatcttgggaggccgaggcaggaagactgcttgaggcccggagttcaagaccagcctaggcaaaatagctagaacctgtctctacaaaaatttaaaaaattagcagggtgtggtggtgtgtgcctgtggtcccagctactcaagaggctgargcaggaggatcacttgagcccaggcgttggatgctgaagtgagctatgatagscacctaggcaacagcatgacatcctgtctcaaaaactaaataaataggccgagtgcagtggctcacacctgtaatcccagcactctgagaggccaaggtgggtggatcacccraagtcaggagttagagaccagcctggttaacayggtgaaaccccgtctctactaaaaatacaaacaattagctgggcgtggtggcgcacgcttgtaatcccaactactcgggaggctgaggcaggagaattgcatgaacccaggaggcggagattgcagtgagccgagattgtgccattgcactccagcctgggcaacaagagcaaaactcttgtctcaaaaataaaataaaataaaaaataaatattagccagagatgatgttacttctaatgaaggaaaaagtgatattcactacaaataagaagaatgtctaccacctctctagcatttcattaagggagtacactgtggttctgatcacctgctgtctgaattttaccataaattatattttgaatgaataataatctgtgactgtattggcaaaacaaagtcaaatatatgagatatttttaaaagatgtaagccattttaatactctagttactctaattctaaggatcgctattccacagaggccactactctgctttagaagagtttcattatacctccctggcaatgtaagacataaggaatccagagtggtttttacatccattgcatttacccaaatacaccatcggagggcagcacacacctggttgacttaactgcctgtctggtggccttatcaaaatagttgtcaaattagtctaagacattcctaaattaccactcagataggcaggaaagctgttggagaagacaaaaggagcaaagatttttaaaagacaaaagaatgcattccttaagactctgagtttctacaaaagggaatctggagctaatcaatgctgcaaaatgggaaaacggagttaaaaaaggaatttcctcaatctgagaaaacagatttgttatatttgaaagatttttactgagtatgatcatccgaacaccagctactaaacaaaaatcagatctccttgttcctattaagatgcgctaattaataagatggcaacaaagaccaccatataaaagggttccttcagtaatgttttcttgagtgaacaaaaatcaagcctgccttatattgtattctactttgcatcacaaacagttttagtgtatttctggaaaagcatcagcagttttttcgaattttaaattctggagttatgtaactatataggcaggcttttttataacagaatataacagtgatacttaaatagaagacttcaaatgtaaatatcagtagagcctcgttaaggctataaatccagactttgtgataatgtggattaaatattatttacataacatataaggaggccgggtgcagtggctcacgcctgtaatcccagcactttgggaggccgaggcaggtggatcacctgaggtcaggagttcaagaccagcctgaccaatatggtgaaaccctgtctctactaaaaatacaaaattagccgggtgtggtggcacatgcctgtaatccctgctccttgggaggctgaggcaggagaatcacctcgggaggctgaggcaggagaatcgcctgaacccaggaggcggaggttgcagtgagctgagattgcaccattgcactccagcctgggcaacaagagcaaaactctgtctcaaataaacaaacaaacaaacacatataaggaaagggatttgctaagcaaatacagtctaagcagttggcaagaggaaatgcttcaattatttaagaataatttttaagtttaattccaattttaacttgtttgcaaaaatctttttggagaaatatgacgtatatgcatttctaaccagcttcttgcatgattctaatatagtcacctagtaccagtaaacagactgctctttgatttttttttagaacaccaggcactactttcttggagtagatgattaacccagctaaagcttgatttttactagctagcactttattaacctagtgtgttatattgtgactttaaaatggtaaaaacaattayaaagtggagttctcattcaggttagctttctagtccaagtcactaacaatttactatgtaatagacattctaagatttctgccaacaattctattgtcaatatataaaatcaattttcagaaaactgtaaagattatttccttgtttaattaagattctactaatcatagaaaagattatattgcacacttttctcaagttacctatgggactgacaatatgtccatgtgtcctgatagtaaagtcagttatctgaatgcgttccattttggaataagagatctaagtgctaagcaagtaaccaccaccacattcaggtttagaattggaagatctttcattatattaatagaccctttatttttagatataacaaaataccaaagacaaatggccacatatatcctaatgtacttgagaaatctcgctactaatgctgtgtcactaattttttaatactgtatttaagaaaaaaaaaaagcctgtcttttctattggcatcattcaagaagaaaaaaaaaaagctgaatcaggatatttctgtgtgaatgcacattcctcactaaatctctcaggcagctgctttagtcactgttactaacaccttgctctgtcatctctttgtacacatgtctaatttatcagtttcttgtagattgtcagcagcctgctgcctccgtaccgccacagtgctcacaactagccgggaggcaagactgcccaactgtcaggtaaattcagatgtcctttcccttccacccagctgcatgtcagatccatagaccccagctcccctttccgacacctgaactgcctacgcatcattgtattttgctgtattttatttcaagtgtgggctacatagacacacattggacacctgcagtccctgcgttcccagtaggaatacaagagagctggggtttattttgctggctgccagctggtagactctacaggctgccttcagcccctttgtctgtgtaaatacttggattagtccactgtttcattcctttccaaaaaataaaagctggaattgttatgatgtttgtcctactttttattttcttttgtctttaaaatatatttattttcctgsggaatctgagggataccaatatactaattgacctgatttgattcctgtactttatatgtattaaaacatcactatatactccatgaatatgtacaattattatttgtcaatttaaaaaaataaaatccccgctactcaggaggctgaggtaggaggatcaatcgcttgagcctgggagttcaaggctgcagcgagctatgataccactgcacacctgcctggtgagtaagaacctgttgctaaaaaacaaaacaaaacaaaaaacacagtaaaataaaacttaaagtgtttaaataggccaggcatgatggctcacacccgtaatcccagcactgtggaaggccgaggcagagggattacctgaggtcaggagtttgagaccagcctgggcaacatggtgaaaccccgtctctactaaaaatacaaaaattagctgggtgtggtggcacatgcctctaatcccacctactcaggaggctgaggcaggagaatcacttgaacccaggaggtggaggttgcagtgagctgagctggtgccactgcactccagcctaggtgacagagagagattccatctaaaaaaaaataaaaaattaaaaaatatatatctcaggccaacaaacaggaagaatataaagaattagatataaaggctgggtgcagtggctcatgctggtaatctcagcactttgggaggctgaggcaggaggattgcttgagtccatgaatttgtggttacagtgagtaaaatcacatcamtgcactccagcctgggtaacagagcaagaccctgtctctagataaatagatagatagacagacagatagaacagctgtataaaagtgtttctgtgtttctgttctctgtccactcagtagccttggtaaaactgaatttgaaaggtggagaaaaacattgtagttagcattcaaaagataatatttgctgtgacagtgacctttatgtgagattacttgaaaaattgttaaaacaggtttgcacagtcctgaacactgaactggagagtttgctgacaattccgattccaaaggaaagctttccaaatcagtcatgaattgccctccatcctggtgaacctccacacagcrtctcagcgttccatcaggacctcacctccatcctggaatgcttcatctccagccacctggcctctgatggtgccagacctcagtagtcyggttgtggttttcatcatctgctcagtgttctctccttatcacagctgttgcccttctaccaggggaaggcttcttttgagcaggggcaggcccaaacactttccatgtgtgtctgaggagtagatgtcagtagcaagctacatgtggtcaggggtcagagccaggggacctggggtgccacaagtgtggaaacacagtggcagctgaagcccaagtgtcacatggtctcagaggcggttgtgcagccagctgtatcagtggaacattgagttagcacagaaaggtacattattggccaggtgtggtggcttacgcctgtaatcccagcagtttgggaggctgaggcgggaggatggcttgaacccagaacttcaagaccagcctggggaacacagggagacctccacccccgacctctaccaaatttttttttttttaaattagccaggtataatggcacatggctgtagtcccagctatttgggaagctgaggttggagggtcacttgagctcgggaggtcaagactgyagcaagctgtgattgcatcactgcactccagcctgggtaacagagtgagaccctgtctcaaaaaacaaataaataaataaaaagaaaaatacattataaaataggttgctagccagcagtttccaattggtgtgtgttagttgattgttcccaccaccttcagcaacagggctttaagaaaggtttttcgctaatgccattttacaacagcactaatttcggttagaaataataatgataggtcaggcgtggtggcgcaggcctgtaatcccagcactttgggaggccaaggccggtggatcacraggtcaagagatcgagaccaccttggccaacatggtgaaaccccgtctctactaaaaatacaaaaattagctgggcatggtgatgtgcgcctgtaatctcaggttctcgggaggctgaggcaggagaatcacttgaacctgggaggcggaggttgcagtgagctgagatcacgccactgcattacmgcctggcgacagagcaaaaaagaaaaaaaaaaaagaaataatgtaattatagatttatctcaattatataagtaacaatataaatattcaaactcgtctcagtgggattctgaatttgtagcggttaagaacagggctcttcacctacagtccattctccaccaagcacccccagcccttaccscaaggcctgggtcagtgctgggcacatgacagctgtgcactaaatattgattatacctgagagagtgaatgagctctggaatcagattgcttgggttgaattcccacttctaatacccactggttgtttaactttgraaaatttcttttgctggctaagattccatttcttcacttgtaaagttcagatgacaatagatactgagggaattcagcgaggcacgctcctggcttggagtgtctgctcagtatctgttatcaatacttttttagtatcttaccattcctcaagacaaagatctgcaatctcttaacctctctaatttgctgaagaaagcgtggagcgggctgctgttttgtttgcttcagagattgggtctggctatgttgcccaaactggacttgaaccctgggctcgagcaaccttcctgcctcagaagactactgcttgaagtgtttccattaagtaggaaatggaaaggctggcaggagatttttttaacttttttttttccaccttgcttgttttttgagaaccagtttgactaaacaattatgtagtctagttccatctgttctgagattaataaatttaggttgcttactactaccacagggatgatttactttaaagaaaagcaatttaatgaattacaaacatttccagcttctcaaatgtttccagtttctacccacatgaatacagcctggtctagagcccaattctactactgttccccatcgtggtctacgtaaagaaatgattaaatgcatatagatctgaaaagactcttttccaaaattgctgggatgatgactgactcttttcccacccatacacactgccaaatgggtcaatgttaataccttcattgccctttttactccttcttggcagaaaagttaacacatagccaacattcgaattcttagtataaaccagacaagggttcatttctttacacatattaaacattacagccttccataagggataagcacagttattacacccatttttgttgttgtttttgtttgtttggtttagttttttggcgtttttttgtttgtttttgtttttgtttgagacagagtctccctctgttgcccaggctggagtgcagtggcgtgatcttggctcactggcacctccacctcctgggttcaagcaattcttctgcctcagccacccgagtagctgggattacaggtgtstgccaccacacccagctaatttttgtatttttagtagagacagggtttcaccatgttggccaggctgcccttgaactcctgacctccagtgatctgcctgcctcagcctcctaaagtactggggttacaagcatgagccaccacacctggtcttacacccatttttatgtgacgaaattgaggtttgggaaggtaaaatgacttgttcaaggtcacatatcctgaacacaactgagcctagtgactcctacctaccaccacaggtggctgcactgcagaggagaaatctatttcagttacactgtgaggagcaaagtcagagtatgtaaatcacccaccatgattccttttccctcaaactgaagaggaatgtttgtttaatgagaaacagaagatgtgctaagaatgttgagttatttcacatcaggtgttctgtttctcattttgaaaaatgattttgagtgctgggcccagtggctcatgcctgtaatcccagcactttgggaggccaaggtgggcagatcacctgaggtcaggagttcgagaccagcctggccaatatggtgaaacggcatctctactaaaaatacagaaattagccaggcatggtggcaggcacctgtaatcccagctcctcaggaggctgaggcaggagaatcacttggaacagggaggcggaggttgcagtgaaccaagatcacgcttggacaactccagcttgggcaacagagtgagactccatcttaaaaaaaaaattattttgtacttccctcggtttatacatatattcaaacagcttttaaggtgaatgattttttaataaaagagcattttctcacctttaacaatgtagaacttttcagccggacatggtgactcacctctgtagtcccagcactttggaaggctgaggtgggaagattgcttgagcccaggatttctagatcagcctaggcaacttggtgaaaccctgtcctttaaaacaaaatacaagaattaggcatggtggcctgcatctgtagtcccagctactcaggaggctgcggtgggaggatcgtttcagcctaggagttcaaggcagcagtgagccgagattgtgccactgcgctccggcctgggtggcagaagaggaccctgtctccaaaaacagaaaaaaagtagaacttttccatgtatactttttacaggctaattccattgtagagctaaattatcaaaattgtttatagataataggtattataatatgaaaggaatgcccaaggtatatagccttggatataatattgaaatatatagagttgtttggtatttagcacttcccttctatcaagtagttttctacttgggaaaaaaaaagaaacttcctgaagatgtatccaattttatatcttagtaacagcttcctaaacttgccatttacaacatgatctacctatgtaaagtaaaatcaatggtaaatgttgaataacaagtggactcttgaaaatatttagcaatcacaactgaaactgaattcattctatgccttaaatgattataatttatcaaatatttatatccaagaaatagtatcttaacctgtaagccaagaatgtgtgtcttacaggttaatttacacataatatacaccatgtgattgcagcattttatgcaaattaaaaatattaatactatagataataactttatgtaagaaatctatctaaaggaatgaaaaaaatttaaatcatcacgaatgatgtaatgtcaaggtgttaggcaaagtgagttgtaacccatatttaagctatagctacacacttcagctggtcaggaagaaatatttgtcttcctttwtcaaaaagagtattggggccaggtgcagcggctcacgcctgtaatcccaacactttgggaggcygaggcgggtggatcacaaggtcaggagwtcragactgtcatggctaacacagtgaaaccccgtctctactaaaaaaaaaaaaatacaaaaaattagccaggtgttgtggcatgtgcctgtagtcccagctactcgggaggctgagacaggagaatcacttgaacccggaaggtggaggtggcagtgagccaagatygcgccagtgcactccaggctgggcgacagtttgagactgtctcaaaaaaaaaaaaaagtaytggattacacaaggtcttcaaaaacatatctttcttgggtggacacagtggctcatgcctgtaatccttgcgctttgggaagcagaggcaggctgatcacttgaggtcaggagttcgagaccagcctgggcaacatggtgaaactctgtctctactaaaaatacaaaaattagccaggtgtggtggcgcaggcctgtaatcccagctactcaggaggctgaggcactagaattgcttgaacctgggaggcagaggttgcagtgagctgggatcgtgccactgcactccagcctgggygacaaagtgagattctgctcaaaaaaaaaaagaaaagaaaagaaaagaaaaaaaagccatatctttcttgtgtaatgtgacgattctgcattacttgccataaatcacattgcataatatgtttagttccctaaaaagaaattagttctggtgctgacttccacagcacgtatagtaaaattggagttttttttactatatgtgctgtggaagtcagcagtctaagtcatgcatatttgcagaaaaactgttaggtcgatgggaaagtctggcctataacctgctgtttaccaggccgtcaaactctgtttggagggtcaagtgtgaatcttgccatacattattttctgttttaaatattttcttttctttcttcttttttttttttttttgagacggagttttgctcttgttacccaggctggagtgcaatggcgtgatctcagctcaccgcaacgtctgcctcccgggttcaagcgattctcctgcctcagcctcctgagtagctgggattacaggcatgtgccaccacgcccggctaatttttttttttttttttttttttgtatttttagtagagacagggtttctccatgttggtcaggatggtcttgaactcccaaccacaggtgatccgcctgcctcggcctcccaaagtgctgggattgcaggcgtgagccactatgcttggcctaagattttcttcatttattttcctttttttttttttttttttttttttgagacggagtctcgctctgtcgtccaggctggagtgcaatggcgcgatctcggctcactgcaagctccgcctcccgggttcacgccattctcctacctcagcctccggagtagctgggactacaggcgcccgccaccacgcccagctaatttttttttttaattatttttagtagagacggggtttcaccatgttggccaggatggtctctatctcctgagctcatgatccgcccgccttggcctcctgaagtgctgggattacaggcgtgcgccaccgcgcccaggcttattttccaatttataaatgaggccgggcacggtggctcgtgtgtgtaatctcagcactttgagaggccgaggygggcagatcacttgaagtcaggagttcgagaccagcctggccaaaatggtgaaagtccgtctctactaaaaatacaaaaaattagccggacgcggtggtgggcccttgtaatcccagctactcgggaggctgaagcaggagaattgcttgaacccaggaggcagaggttgcagtgagccgagatcgtgccactgcactcctgcctgggcgacagtgagattccatatcaaaaaaatttacaaatgaaactatgcactattttcttaggctttttgttgaaggtccagttctcccatgtttacataccacattttaaaaataggtaggaaaaacaatttttatcactgcttgtcttaaccagtacagaacagcaaagcttcttttaaactatatttacagcacttcaaagagtttgggaagaaagaataacctcaagccagtcagatattttccataattatgattttgtattaaaatgcaagagatataggtagaggataatttcagtaccaaagataaaaattatttaatactaattttaatgactccattacattttaaactccattaaatttaaagctaattttaattagctttaaaaagctatgcttaaattaatagtaataatgagccttgaattgttctctcaaacatcacttctggtagaaatgaattatatagtactgactttcatagtttaagggaatataacagagttttagaaaaatactcttttctaattaaaaaaacaaatctccatgttgtgattcccccattgctagtcacattttttttttttttttgagacggagtctcgccctgttgccaaactggagtacagtggcgccatcttggctcgctgcaacctctgcctcccatgttcaagtgattctcctgcctcagcctcccgaatagctgggactacaggcacacgccaccatacccagctaattttttttttgtatttttagtagagacagggtttcaccatgttggccaggatggtctcaatctcttgacctcataatcctcctgccttggcctcccaaagtgctgggattacaggtgtgagccaccgcgcccggccgctagtcaaattttaaaaggcccaaacccaaatgtgttttgtcattttaccctaggaaactcaatgattttgcttctttattcttcaagattattcatccagaccctgataggcctgagcacaggttcatttaaactagaggctatcacaggcgtcgtttggaaagttacattatacacttaacaaatgggaaatgttaggctgggctcggtggctcacgcctgtaatcccaacacttggggaggccgaggcaggtggatcaccagaggtcaggagttcgagaccagcctggccaacatagcaaaaccccatcactactgaaaatacaaaaattggcagggcatggtagtgcatgcatgtaatcccagctgctcgggaggctgaggcaggagaatcgcttgaactcgggaggcggaggctgcagtgagctgagatggagccactgcacaccagcctgggcaaaacaacgagactccatctaaaaaaaaaaggggggggggtgaaatataaaactcttccttatacctccaagcccaagcaggtagggggaattcttagagcaaattagacttccacaggcaaattctttatcctagtgaatctggatctaccagataactatagaatcctctaaactccaaagccttggtcaacctgtcagtaccatcagcatcactgggagctcattaaaaatgtagaatctcagatctcaccccacacctaatgaatccgaatctgccctttatactgagctccccaggtaatttgcatgcatattaaagtttgaaaagaactgatctcatgaaatcttacagctaacacagagacctaggagaacaagaccgtgcaaaaattgagaagaacttctgtaaaatgctgggggcaagaaaatagggaaaacaagaaaagagaagagtgactttgagggaagagtkcatatatcatttccttaatacatttcatttttcttttttatgccttgttttgaaaagctaccattatcttggcatgctttagatggaaaccatttactgtgcagatttctgttcttgttctcaaaatstatgcaaaaatatctcgtctaacccctaccattgtgcctggccctttgaaatgtgtttcttgctgacgtgcttgtttctcctttccagtcctgacacagctctccctgaggagcagccacattccagctcccagtgcgcccctctccactgtctctccaagcctcctcacccctagtcttcatctcctgtggacraacatctggggtggaagttttgtagccacacacaggatactgcccaagatccagcgggtgttttcttctcggttgttagatgtacaattggattaatgtccatcgttttggaagacgagagaaagttgagaagaacacgaagcacagaccctgatgtgataaaacattttgtggtttctctgagtcacagataaacttctgccatcaaatggctacagttcatttaaatttaaaaaaaaraaaaaagaaacagaaaacgtgtctcagatggctggctttacctcgatagcataagagagacctaagacatgtaaaatacgtatattgcagtatcatctttcctcacactccaaattcagctagggaagttgattccaatatgtttgtcattgatatttattttgtactttatttgctacatgatttatgtctatacaaataatttctctgaggtgaatttaattcatttattttcaaataagcataatttgctcaattaagtatgagtttgaatttagtttgaaatctggaattggccagactgtggtcatttttcttgcacaaaatgataaatgaggtgcatcagaatgttaacaataactgtattttgctgctacgctggtattgtttakgcacttactttctaatcagtagctcattaactgctgggttttgtttttgtatttttaactagagttcttcactggacattactaagtaaatctaagaaagagactaagttatgatttattgacttattcaagttttgatggcatctttacttttattttttcattgcagttgagtagatgtactggtgctgctcctttgtatgtgtgtatgtgtgtgataacgttaaagaaggctcartaacttgaagggaaaaaaatggtgtgtttatttaatgaccagaattttttttacttctcccaaaatcagggtcctactgagtctttcctgataaaaggtatcaagtacaaatgggaaaatatatacatatatagatgtaagatagcctttaattaattaatttacccagagagtgttcaaagtttgattaaaattgtatgttttgttgttgttagtttttttcataacgaatcttccttgccaaaaaaacaatagataataaaccttagctcattgtctacttttgacaaacactcaggtgcctacaaacattctattatcttgagataatacatgttcctggttaatttacagattctgctgggtaacttttatgacttgatttaaggcagtggattttcatagcaaaatttattttgcacataatctgacaaacaaggaaaacagctaactgagctgaaaggtctaacactctcgggctccttaaccatcaagtgctgcccacacaattgctcctagccctgattccttgtctttgtcaggtagccttaacttatttaaaaccataagggtttgaccttttcatataaagacatctgtaacttctcttcaaaacaaaaatgaccctcactgttaacacaaaggacagttaccagtgtagggcactgagaaaggagatccaggagccactcagcttattgagcggacatgggtggcacagaaatggagtggtccatcagagaccaaatggtaagtcgtaaagcacattgcaggagctttcgttagtcatacgcctattaagtagtggtcgctattaccaaagcaaccaggacgttttgtgttctttatatgagtgctattttccacagtgtcatttattatgcaacgtggagtaaagagttgaaatcttcaccaaaataagggttcaggttaaagtacagaaacagaaacaaaacgattcgacatgaagttcccaaccatagcagcctaaccttctgctcttttctacctgcatggccttgctgttcctaaacattgtcttcatttcactggcgttgtatctgcctagtaccagtattagtgagactgtggattttatcagagttcaatgaaagaaagcttacccctgccctcactttgtgttttttatttttccccctttctcaagcaccacgtatttggacctgagaagtggcatagctgctaagttgacttttaataaaaaactgtttgtgcctgagggaaatatatgcctttttaaaaagtacctcagaacatgttcstagatcgtctcatcggttttgtttggtgggactgggagttcagcaggaagtattgtctgtgtgtgatgacggggcagtattgccagtcggcaatgttgtatttgcattctttatccctaactctgaatctaggactccatgaaaagccgggtcacccacaaaacatttcttccaatacaaagtgtattattacgtctattataaactagtttcatttcagttatttatcttcatagagtgggaaagtctttttctgaaatactaattctatgaaaataataattttagtgaatctttgccaagaagttatagaaacttggaaataaatttctcattttcagcacaaaattaagtgatagtccctaagcagtaagagagaataccatgtatttacactgtggcatcatttagtatagtttacactgagccatatttatttataggcatttaaagtgaatcagtatgtgtagtgttgataaaaatcagtatctgtaaagataacatcaggaattcaaaaggaaattgaaaaggggcagaactagtgagaaccaaaaagaatgaactccagtaagactaattgaagacatacttggagaggaaaaataaacagcagaaatgcactaaaaaatactggctaattattgcaaacagagtgagcaaagattaatgctaactagtaaaagtagttagcaaagtaaacaggtagttttttaaaagtaagcacaattacaatattgaatagtatggagaaatgcttttctcctgaggattttccttaatcaaaaaataagaagaagcaataaattgtctttggcctgagtgctgagtggcataaataaaggagcttggcttaatctttctggtccacacataatccattagatcccattcatatatccaactctggattctaataaaataatttggagaactttgagaaaaaggaaaactgttaaataagaaaagacctatttagaaattatactttagtctaacraagaggaggtacaatagtagtcttcaagaaaagaatatttaacaaatgatagatatcagctatagatattgttactaagtctagaataaaaaaggcttcagtgtgaaggatgtatagtaactctaggaaagagatttttaacactgggaaattaacgtggaaattgataatcataaagaatatttgttttgtaaaaattgaatatcattggtggtctagtaagtattaagtggcaagataggagaatgcatttcagttctgggagctcataatcctgtgattcttttattttaagttttaaaatacattaaaattttactggttaatcataaaatattttatatttgaaaataggatggcaatctttatttttccaagatatttgttggaaaaaaatgatygttggtattattttttctttcagctatattccatggtatctttaaaattgttcagaatataggacttttactaaaaaaattcaattgtcagagtctaaaaaaacaatgtcctcaggaatacttcagaaatagaaggtatgcaatcccttagtggggggcaaacacatttcagatttcgtctttatttaaaaggatcttcagwctacaacatttgcttttttcgtgctttggaaaatatccttgtgcagataagttcttctgtttgaaacaagcatgaaacattggtccaataacctaagaatgtggagatttcttgatattctgtattaattaaagttctctacatgtctcaaatggagatcacaaaacatgaaaaggaagaaatgaaatatcttttcttctgggatgagtgtcaattttaatgtataattgtcataatcaatcagccaaaagttacaatctgtccctcagagacattgggggaagctgatggatttccagtaaggaactgtggtgggttcaaactcaggctgccacaaatacattgatatggtaggtaggaagtaggactaaatttgaaagaaacttatgggataaagttcacaattttaaaaaggttgccctccagtttttttgtttgtttataaactagagtgatttttaagtaacccttatatttaaggctgcaaaaaatgtacaagagtatgttttcaagtaaagggaacataattcttcaaaaagctgttgaactggagttatgataggttatgacagagagcatgatcagtgctgatactgacaagtacttttttaccttaaaatcaacttctatggaactacaagatcaatctagctcccgagtgacattttccattgtctgtaataatgccctcggatgagttgtgtctaaaattaagttcatctttatttatatgcgaacttaactgccatagtccctaatgtattgcrtttgtaacctgatcgtattatgtttacagctgaaagatttcatctagacatgtctttcgtccttattattcaaagtgtaattgaaagagatatttagtattaagacatgttccccaattgagaattttccagaatattctacttaagaagaagaagagcaattaactgcctttagtgtaagggcgagagtgcatagaaatatgcaatgtaaaatgtttgcatgaattatttcacatcatgtaagctttcccatattcataagatgaacactatagaagtctcatttctctgtgatcttctgtccattaggaaagtaaggagattgttatctatatctagtctcctttccatattgaactgcatggctctaatcctcagtgtatttttatcccttctcgagttatttaaaatttgccctatttaagctgaagcctggataaactgctgagccagattattcctgtgattggagtttaattgctgtagaacacttgttgagaacacattttttactttttttctttcagaattattcctcaatcattgttctctaatgaaaacaccgagaagtaaatctggtgcttcttagtgtaaatatgtttttctttttaaaaagtcattttaaaacaaagatgagagaactataaagtaaggggaaatatcattttatttaaaaataattattcaatgatagataatggagatacagaatgamtcattgggttcataggtatgatttgtgcagccagtcttagaggaaatacatcattttaacattattcccacaaaatgttaaagctcaatggtttgactatgagagtcaaacaattactatttgaaaatctcttatgacatttttataatctactctgtttttatttgcatgattatgcttatgtgatgaaccatccatgattctgatattgtatttctttccagtattaacatgtgtattgtgtggccaactctgatttgtacaccgtattattgttgtaatgattcaactgttcctacatttaattgcagtttaattattatgccttttggggttaaatgatgtgaagtgtttccacctactgataaatascatatgaaaacaygactaaaagactgatttaagaaacttgttatttttaaaaatatgaatttcaaaagaaatgttctcaaagacacatgcatttattttaaattcaaaaaattcttatgaatttattattgcttgtactttaactttttttattgtagacaatcctaagtgaataatgtctcatgggagaacacatgatatgtgcttgtatttgtgtaatctgatcatgcactcaatggttggaaaaggcactccagtgctaagaaaataaccagaagccaatatatcgattcttatatctcggtttatgttaccaactgaatatggtgtaatgcataactttttccagtaaataaactggttattttttgttcatttcattaatgctgcctttttatcaatttgagcagtttttctgtatgtcattttgatgtatacttacaaaaaggaaaagactatatgaattcagatgtgatctatatgtttattcaaagtaagaacttatttgaactaaaaactaaatgctttgctttaacaacaattctatacattcctggtaagtaatgtgtatcaactctgctcatttcctccagttatcacctcttctacttgtaatcttttctagaaagctattttggcaggaggatatacttggctgaatttgattagaaatgtaccaacatgaagaaaatgcttgccctaaaacaggaaacattattttgatgaaagaagaatgaagtttctatgcattattttgggagacaattcctctttgttctttttggaacagcagagttccaaaactttgagggaggttaattttctagctcctcctacaaatacatattgtagtaaatcagctgctttgggaaccatccactttgattcgattttatttaaagggtggaggagggggagaggcagatagaacatggtgttctagtgagttaaaacgtctaatgcaatcctcattatagctaatcaaattcgtgcaacacgggcagccaacatcctggcaaaagctgtctgctcacctgttgcataaatacaacactagaaataataatgtaaacttttctacaaatttctcctttttctcttccaaaagcttttgtttttcttggaggttggatctataagtctatttgatacttgactttctcttacatgataaagctgatagtctgccacattcaaaagtgaaaacagctggacgcatcaagaaagtctcttctcatctatacattttgcaggcaacttggacagcctatattgcaacccacaagggatgagaaagagagcagaatcgatgggaacttgtggaagggatttccgtcttcttcttcttcttcttcttcttcttcttcttcttcttcttcttcttcttcttcttcttcttcttttcttcttctttcttcttctccttctccttctcttctcctcttcttcctcttcctcttcttccttcttccttctttcttcttcttcttcttttttaaagagggagtcttgctctgtctcccaggctggagtgcagtggcatgatcttggctcactgcaacctccgacttcctggttcaagctattttcgtgcctcagcctcctgagtagctgggattacaggcacgtaccaccatgcccagctaatttttgtatttttagtagagacggggtttcaccatgttggmcaggatggtcttcatctcctgacctcatgatccacccgcctcggcctcccaaagtgctgggattacaggcgtgagccaccgcacccagccggattttttttttcttttgaaacatggcctcactctgccacccaggcaggagtgcagtgggatgatcttggctcactgcagcctcgaccccctgggctcaaatgattctgccacctcggcctcccaagtagttgggatcacaggcatataccaccatgcctggctaattgtttaatttttttgtacagatgaggtcccactatgttgcctaggctggtcttgagctcctagactcaagtaattctctcatctcagacactgaaagtgttgtgattacagacatgagccacctcgcccagccaggaaaggattttcttggtttttggtcgtacacatgctgactagcacattgtaggaactcagtcaattttgaattagagtagttgttcctgagaagtgagtttcttggcttcttgacatctagctttctcataagacatccagaattgagtttacagaacctaatgtcacctacttatataattacagcaggcactaaatatcaactaattgggggaaatggcctttaaattaagtgaatgcttattcctgtcattctgtcttagtgaatctaaaaactagatctcttaacactgtaataggaggctaagtatgtatgatgaaataatctaagaattcttttttttgtgtgtgtgacaagatcttgctctgttgcccaggctggaatgcactggcaagatcacagttcactgcagccctgacctcataggctcaactgatcctcccactgcagcctcccaagtagctaggaccacaggtgcacaccatcatgcccagctaattttttattttttgtaaagatgaggtctccctatgttgcccagtctggtctgaaagccctagactcaagcaatcctsctgccacagactcccaaagtgctgggattacacaggcatgagccaccatgcccagttgagtttcttaatttatgaatcaagtacacttaaatgctttagaagaccctcagaataattaatccacaaaataactgtcaaggaagataaatctctgggaaaaatatttcaagtgtcaaaagtaaacaatttataatataatttgaatgtaggaagcaacataaagataaataaatcataaatatagtggcttcttgttaaatagtaaagaaatgttacagaataccttgttgccttcttttcttttttccttttttttttttgagatggagtctcgctctgtcgcccagcctggagtgcagtggcgcgatctcggctcactgcaagctctgcctcgtggattcatgccattctcctgcctcagcctcctgagtagctgggactacaggcacctgccaccacgcccagctaatttttttgtatttttagtagagatggggtttcaccatgttaaccagcatggtctcaatctcctgacctcgtgatccacccgacttggcctctcaaagtgctgggattacagacgtgagctactgcgcctggccccccctttttttttttaaagattaatttatttatttagtttttagttttcagtttcactcgttgctcaggctggagtacaatggggcgatctcagctcactgcaacctccacctcccaggttcaagcgattctcctacctcagcctctggagtagctgggactacaggcgcctgccaccacgcccagctaatttttgtatttttagtagagatggggtttcaccatgttggccagcctggtcccaaactcctgatgtcaggtgatccacctgccttggcctcccaaagtgcttggaatacaggtgtaagccaccgcccccggcccctcattttccttattatctatatcagtaggggataaaagaaagataattcagtaagttagcttctgttactactaaagtcaggtgaaagactataaatagtaggatagatgtatgtttcatatcccaagatgggctttatctaatttgctagtcccagtgcaaaatgaaaatgcggggctccttgatcaaaaaataagaagaatttcaagacagtgatagcaatgcattaggccaaacatgaggtccttctaagcacagggctttgtttgactgcagggatccacaggccatgaagccagccatgccccagaatatgctgaaataatgattcaggatctcaacactgaatgtagctattcagaaactgggctttggtgaccaggcgctgtggctcacgcctgtaatcccaccactttgggaggctgaagcaggtggatcacgaggtcaggagtttgagaccagcctgaccaacatggtgaaaccccgtctctactaaaaatacaaaaattagccagacttggtggtgtgcacctgtaatcccagctactcaggaggttgaggcaagagaatggcttgaaaccaggaagcagaagttgcagagagctgagattgtgccactgtgctccagcctgggtgacagagtgagacactgtctccaaaaaaaaaaaaaaaagttataaaaaaaaagaaactgggctttgtttttaacaaaatatacttctaagtttctgtgcttggaaggaaaaatactaatgtgtttacgtcctggggaaaaatatttaatgctaatatatcaatgagttctaaagttgaatcttgcaatacttccttattccaatgtagccataacatgtcaactcaaaatttctaaacaactctgatatgtgtatcaggtcatactaagattataaaaatctttaaatctttaaaaaagcaacagtagacattttaattagtgtatattaaagtaaaactaatttaagaaccctactgatacttttatagtttgatgtcctttgaagttgtaaaatattaataatgtcagtcaaatgtcacaggaagatttgcctaactgaaaagagctattagtccaagattaatcagtgattcatatcaacctttattccaaataaataaaaaaagaaattatttacctaattgaaatccatttattttgaatatacgggtgctcatgtgtagtaaaccaccctatatgtaaaaaaaggataatataaaaatatatagtaagtgtttcttgttttggataaagtaacagtggaaaccaatagaaatggttatctgtaaaagagcagagggtatgataaaagggtggaagccagactctttcagtgcacgaatgcctttcttacatattgttttcagccatgtaaataaatgatttatccaaaggaaaaaaattaagataacgtgggctctcaaaaatttcacaatgaagccataaataaaagcacaaaatcggccgagtgcggtggctcacgcctgtaatcccagcacgttgggaggccgaggcgggcagatgacgaggtcaggagatcgagaccatcctggctaatgcggtgaaaccccttctctactaaaaataaatacaaaaaaattagccgggcatggtggtgggtgcctgtagccccagctactccggaggctgaggcaggagaatggcgtgaacccgagagctggagcttgcagttagccgagatcgtgccacggcactccagcctgggcgacagagcgagactccatctcaaaacaaacaaacaaaaagtgcacaaaatctagatgagtatttgttccatagcagactatgtcagcagaactatttttaaaaacacaaaattttattcaaattctaaccctggcacgcacttactagctctgtcactttagaaaggttcttaccctctccaagcttaagtggtcttgtttttcaaacaaggattaaaaattgcctacttgggctgggcacagtggctcatgcctgtaatcccagcactttgggacgccacggcggctggatcacccgacatcgggggaaaaaaagccggctgggtggatcacttgaggtcaggagtttgagaccagcctggccaacatggtgaaaccccggctctaaatcagccaggtgtggtggccgtggttgtaatccccagctatttgggagactgagagagggagaattgcttgaacctgggaggtggaggttgcagtgagccaagatagtgccactgcactccagtctgggcaacagagcaaaacccagcaaaacaaacaaacaaacaaacaaaaacagcctacttggcaaggttattgcaaagattaaatgaaataacatatataacaactttcaaccagtgtttagtctttagtagctattattattattaagagtttcgctcttgttgcccaggctgcagtgtaatgggcgatctcggctcacagcaacctccacctctcgtgttcaagcaattctcctgcctcagcctcccaagtagctgggattacaggcatgcaccactacacctagccaattttttgtatttttagtagagacggggttttaccatgttagccaggctggtctcttaactcctgacctcaagtgatccacccacctcggcctcccaaagtgttgggattacaggtgtgagccaccggtgcccagccgatactactgttttttgtgtctctttccatccatggtacatatatgatagtaacttccaaaaggtatgaamcttcgttttcttccctaatgcatcttaaacgcctagagtagaatctggcacaaaataagttctcaatagttggtgaattgccaggcgcggtggctcacgcctgtaatcctagcactttgggagaccgcggcgggcagatcatgaggccaggcgattgagaccatcctggctaacacggtgaaaccccgtctctactaaaagtacaaaaaattagccgtgcatggtggccggcgcctgtagtccccgctactcgggaggctgaggcagaatggcgtgaacccgggaggcggagcttgcagtgagccgagatcgtgccactgcactcccgcctgggtgacagagactctccatctcaaaaaaaaaaacttgctgaattaaggaatgtataagtgaatgaatgaatttcacacatgtcaatatataggactccaattatctaggtactgttattaaaaataatattagtggctgggtgcagtggctcacaactgtaatcccagcactttgggagcctgaggtgggcagatcacctgaggtcctgaaaaaaaaagcagctgggcgtggtggcgtgcacccctaatcccagctactcggggaggctgaaacaagtgaatcccttgaaccgggggggcggggggttgcagtgagccgggatcgcaccactgcactccagccttggcaacagacggagactctgtctcaaataaacgaacagaaaagagttgcatgataattatataactatcatagtattgtatccggaattgttgggttcttggtcttgaggccctggaccctcacagtgaatattacagttcttacacactgtgtgtccggagtcttttctttcctatgttcagatgtgtctggagtttattctttctggtgggtttgtagcccccctggctcccggagtgaagctacagaccttcccagtgaatgttacagcttaaacacagcagcagacccaaagactgaacagcagtaagatttattgcgaagagcaaaagaacaaaacctctactacctaaaagtggaccgagccgattgctgctactagcggtggcctgcttttattcctttatttggccccacccacatcctgttgattggtccattttacagagagctgattggtccgctttacagagcgctgattggtccgttttgacagagtgctgattggtgcgtttacaaacctttaggcagacacagagtgctgattggtgcatttacaatcctttagctagacagaaaagttctcaagtccccaccccacccagaagcccagccagcttcacctctcaatggcactcaccgctgcgggactttgcggcacgtagcccgggcactctggcagcccagagggaactcgtccccccgatcaaacccagcaggcgccagccggtcgcgccgagtgcggggcttgccgagcccgcgctcacctggaactcgcgccgacccgcgagcgccgcgcgcacccctggctcttgcagcgcctctctcttcacacttccgcgagagcagagggagccggctcaggcctcggccagccccagagaggggccctcatagcgcagtggcgggctgaagggcctcctcgagtgcggccagagcggacgccgaggcggaggaggcgctgagagcgagcaagggctgctagcacgttgtcatctctcagtatgttagattatgaaactgtaaggtaaaaataaaaagaacagggaaaaaagattgtgtcagattgggatagggagaaagtaaaacagattattaaatggggtgatcaggtcgggcctcatcacaaagatgaaataagaaaaaaaatatttcttttcacatcatggttgcttcagttttaaaaaatattaagtcatctatatacaattttttttcaatttttgtagaactaattgtccatctaaaaatatcagaccaggtgcagtggctcacgcttataatcccagcactttgggaggccaaggcaggaggatcaatttgaggtcaggagtttgagaccaccataggcaatataatgagtcctcatctctattaaaaaattagccaagcatggtggtacgtgctggtagtcccagctacagaatctgaggtgtgaggactgcttgaccccaggagtttaatgccacagttagctttgatcacaccactgtactccagcctgggtgacagagggagactgtctcaaaaaaataaaaataaatatcaaacaacaattaacattaagtaatagcattttcaaaaactattattttaaaattgtgtaataggcataaccattacgaaatatgcatatatatatatatatattttttttttttaagagacagggttggctgggcatggtggctcaagcctgtaatctcagcactttgggaggctgaggcgggcggatcacgaggtcaggagatcaagagcatcctggccaacatggtgaaaccccgtctctactaaaaatacaaaaatagctgggcgtggtggcgtgcccctgtagtcccagctactcaggagactgaggcaggagaatcgtttgaattcgggaggtggaagttgcattgagcggggatcacgtcactgcactccagcctgggcgccagagcaagactcctctgtcacaaaaaaaaaaaaaaaaaaaagacagggtcttgctgtgttgcccaagctggacttgaacgcctgggctcaaggagtcctcctgcctcagcctcccaagtagctaagactgcaggtgtgcaccgtcgtgcccagctaatatgcatatattttatttcatgacagtgtttctttaaaatcccaatatttattttacaagtagatatcatkccttcttgaagctttggtatttgtccacttaggtttctcctttaaatatttgtatcaaataatttaactcaactgccttattgataactgtaactcctttttttttttttgagatagagtctcgctctgtcrctcaggctggagtgcaatggcgagatctcagctcactgcaacccccacttcccgggttcaagccgttgacctgcttcagcctccctagtacctgggattacaggcatgcatgaccacgcccggctaattttttttgtttttagtagagacagggtttctgcatgttggtcaggctggtctcaaactcacgacctcaggtgacccacctgccttggcctcccacagtgctgagattacaggcatgagccactgtgcctggccctttttttttttttcctttttttgagacagagtctcattctgtcacccaggctgcatgcagtgcagtggcgtgatctcggctcactgcaatctccacctccctggttcaagcaattaccctccctcagcctcccaagtagcttggattacaggcgcacgccatcacgtctggctaatttttttgtgtttttagtaggtacggggtttcaccattgttggccagactggtctcgaactcctaacttcaggcgatccacccaccttggcctcccaaagtgttgggattacaggcattagccacctcacccagccaactgtcaattctaatgaccttgtaattgactgtataaataatccttgagataagtcataatgttatttttcaacatatagtcagaaactaggctattttttcttctggtccttaattccaactcttctccttgaatgaccctttcgtccagattttctataaaattaagggcaacttttaaatattttctcataaacttcctaatacaaaactaagaactattattacattgatggttgggtgcagtggctcatgcctgtgatcccagcactttgggaggccgaggcaggaggattgcttgaggccaaaagttcaagaccaaccaggccaacatagcaaaaacctttctctaaaaattaaaaataaaaagaagtattatttccctgggcgcagtggctcatgtctgtaatcctggcaccttgggaggctgaggtgggcggatcacctgaggtcaggagttcgagaccagcctggccaacatggtgaaaccccgtctccactaaaaatacaaaaaaattagctgggcgtggtggtgagtacctgtaatcccagctacttgggaggctgaggcaggagacttgcttgaacccgggaagtggaggtttcagtgagctgagatcacactattgcactccagccagcctgggcaacaagactgagactccgtctcaaaaaaaaaaaaaaaaaaaaggagtattattacattgctaagctttgcattagttttttggttttttttttgtcaatgttaccatttttcttaggtttatatagattcaaacttcaaagttggctatttcagtagaattaacagcaattagtatatatttaaaagtcagccttttctttattcacatgaatagttgtcctaattctcggttactttattagaaaataaaggccatggtactaaatatgtttatgtaatatggaaagggcatcatcacattctatacctaggtaagtactaggagtacttaacaaatatcaaacagctgggtgtggtggctcacacctgtaatcccagcactttgggaggcygaggctggcggatcacttgaggtcaagagttcaagaccagcctggccaatattgtgaaaccccgcctctattaaaaatacaaaaattagccaggcatggtggcgggtgcctgtaatcccagctacttgggaggctgaggcagggagaactgcttgaacctgggaggcagaagttgcagtcagctgagatcctaccactggactccagacagagtaagatgccgtctcaaaaaacaaaaataggccgggcgcagtggctcacgcctgtaatcccaacactttgggaggctaaggcaggcggatcacgaggtcaggagattgagaccatcctggctaacatggtgaaaccccatctctactaaaaatacaaaaaattatccgggcgtggtggtgggagcctgtagtcccagctactcgggaagctgaggcaggagaatggcatgaacccgggaggtggagcttgcagtgagctgagatcgcaccactgcactccagcctgggcgacagagcaagactccgtctcaaaaaawaataataaataaaataaaataaaaacaaaatcaaagatgagaataaaacctaattggtgaaaatcttacctattaaaagtctattcaattatttgttgtgaagagttcttttttctttttgcatcagtggaatctaaaaaatttctttatgatcaactgagcaaaattataccaactaccaaacataaaacactggaatatgagctgaagtaatggcattctcctggtacttgcaaccctatgctgaaataaacccatgcttctaaagcagttccattaatttaggatgtaaaattcaatataatatagttaaaatatgttctagaatgcatctgataaagtttgaaaacagacttagagagcctgtgacagtgtgtattttcagatggaaaaactgtgcctaaggtgttggacaaattattcaagaactgattgtgttcttaaagatcccctagatcagcaaatacccagggtgataattggctaagtgataatcacaccaattaggctgcagaggcagtgtcagatttttagttcaagatcctattaacagctgagcctactcattatacttctcactggcagaggttctctgtgtccttggacaggatttgcatctctgcctcacagacaggaagtttgggagacatctgctcagttgaggataaaaactttaatttcacctggaataaattagcttatttttcttcagattggccaaagatacaggtctgccaatcccattcatttatttatttctcaaatgtttgcttctttttttctagtaataaagcaatatatatttattgtagccagtttgaaagatatggaaaagtagaaaggaagcaatacaattcacccataatctctctcaatgaaaactgctgttaacattttggtgactttacttgaatcatactgaatatacaattttaaatcctgtttttcaccttttaacatttatggtgaatatttttgtaggttattaaaagtttgcaaatacaatatttttaaggttgacataatattctataggatgaataaattatactttttaaaaaacaaaatactttcctatattggctatttaagttgcttcaagatttttactgttgtaaataatgatgagccacttcctccctytcacccaggacaaaaaaagaaaaaatatatataatgatgccgttaaaatctttctttctttctttttttcccctgtagagaggaggattcatgttyttgcccgggatagtctcgaactcctggactcaaraaatcctcccmcctgagcctcctaaagcattgggattacagtcattagccmccgtgcccaggtttttttttttttttttttttaaggctagttattgaaagcagtgggagtggagaagaaacaaatcggtaactggttgtgatcagtctgttgtaaacatcactgcattcagaccagcctcatgaacaacgtttttgatttgcaatttggagacttaaaaatgaggagactgttttctctcaacaaattgaaaactattaccatgaaaatgtttataccttgcattttaaaaaatatttttgattgccaatattctcactaaaatgtttatcatgtatctatttgtgtctactttgaaaacaaactatttgaaatactgcataaataatatcacttcaggtttatctcttttatcagtttgtctctttttcgtggaaaatttcagagtattctgttaattcttttttttttttttcaatttatttatttgagacaaggtctcacttttttgcccaggctggagtgcagtggcacaatcatggctctctgcattctcaacttctggggctcaactgtttctcctacctcagcctcccaagtagctgggactacaagtgcatgccatcatgcccggctaataaaaaaaaaacaaaattggcctggcgcagtggctcacgcctgtaatcccagcactttgggaggcggaggcgggtggatcacgaggtcaagagttcaagaccagcctgaccaacatggtgaaaccccgcctctactaaaaatacaaaaattagccaggcatggtggcacacgcctgtaatcccagctactcgggaggctgaggcaggagaattgcttgaacccgggaggcagaggttgcagtgagccaaggtcatgccattgcattatcttttttttttttttttttttttttttgtagagacaggatttcactatgttgcccaggctggtctcaaactcctgggctcaagcgatcctagtgcctcagctacccaaagtgctgggattacaggcatgagccactgtgcccagcctctgctgaattctaatcatgcagagctgtgtgggctactgcaaatgcctagtagatgtgtgagccttgtataaagcaatagtgtcattagagaaagatgtaaatttagaattatagattggcacaatagtcttatagcctcagtgtgtcaccttctgttgatcttaccatggtatgtacaaaagtataatatggccgggcgtgatggctcacacctgkaatcccagcactttgggaggccgaggcgggcgggtcacctgaggtcaggagttcgagatcagcctggccaacatggtgaaaaccccatctctactaaaaatacaaaaattagctgggtgtggtggcaggttcctgtaatccagctactcgggaggctgaggcaggagaatcccttgaatccgggaggaggaggttgcagtgagccgagatcgcgccattgcactccagcctgggcaacgagcaaawctctgtctcaaaaaaaaaagaaaaaggttgctctaagccaacgtgctactatagtattgttgatttcaacaccatctttttattgaggcaaataaactaagttagaaatttgcatttatagttaatttatgtatatggaggcaaaactttctgctttaatttatatttgaaactacttgtttaaattacttttgatactatatggcacagtagataacagtgccgctgtcagaaagagaataaatcctaagagagcaaaagctccttttaataaaggtctgaatggctgcataaatcattagagggctagttccttctctttgggagtacgtttatttgggtagcagccagggagactgaaacagttgaactgcccttcacaaaggctgagaaagatcgaattaccattacacttcrgggggctggagatggtacctgggtgaatgaccatgtgaagaaaggcggggtggcttccaagatggaagtgatggctggggaacttggcttgagctgggatacttgtaatggtggctttttgcctcctatctgtgtgatttttgggacacagcctctttgttattagaatagtgaattttcaaatgcagataagcaagtcaatttaaaatgtatttttttggtcaggcactgtggctcacggctgtaatcccagctctttgggaggccarggtgggaggaatgcttgagcccagggattggagaccagtctggtcgacmtaggaaaacctcatctccactaagaataaataamyaaataaatamtactactaattagctgagtgtggtggcatgggcctgtagttccagctagtggtggggctgaggcagtaagatcccttgagcccaggaggtcgaggctgcagtgagttgatagggccactgcactccagcttggatcagggtgtgacccggtatctaaaaaacaaacaaaaaagcatttcttcaggttagtatttagctggtgttaaaaacgaaaacatgataatttaaaaggactctaggctgggcacagtgactcaagcctgtaacccagagctttgggaggccaaggcagtaggattgcttgagcccaagagttagagaccagcctgggcaacatagcgaggcctcatctctacaaaaactacaaaaattagccagcagtagtggcgcgcccctgttgtctcagctactcaggaggctgaggcaggagaatcgcttgagaccagaaggtcgaggctgcactgagctatgatcacaccactgcactgcagccttggtgacagagcgagaccctgtctcaaaacaaccaaaaggactgtaaagtgcattcctaatgaagtcctgaatggagggtctgctgctcttctggaaacctttggattgttaacctctacccctcttttatttccacacctcttatttcattttctgtcccgatactcctggcaagatgtttagttcagtggagtaaggacagacttcggtgcggagactccagctctgcagtgctatgtgaccccactgtaggttcagcaccttggtttccttatctgaaatacttattcggtagttttaggacataagatcaagggttcagcacaacggcttgagacacatacgcgaccctcagagtgcgggtctgcgagaatgcaagcaccctggacatggtccagagtagctggacttcttcccgagggcactgcgtggccagcaggtgagcgcggcccccgcctcgcagcaccccaggtgtgcggccgcaggtgcgcgcccgcgcggctcccctcggccaaagggcgaggcagtggcgcggcagggcggggccggccagagcgaaccggctccggctccggggccgcgcccagggcgctccgctgggcacagcaagttcttggctgcttccccggccggaggaggcggcggcggcggcggcggcggcgctaacaggctgaaccctctgcgctctcctcccgcccttggggacctgctggcgattggctccagagaggaaggggtggaggcagccccggcctggcagctgcggtagcggctttgagtgagtgcgggagctgcagataccgagrcgctgcgactgccgcaggagtcgccgcagccaaactcgccgcgacgccgggagggagcgtaccgggaaggagagggagaggaggcactcgctgaggagacgccgcagtagagggcgcccccggagtcgcgccgaacctgggcatgcaggcgacgccccccaggggccgctcgcggctggacgggagcgggaggagtcggggagcggcggtcgagcccggcaggatgagcgacgagggcggctccaacttcaggcgggtggcgatscggcggaagtccaacccctcctacctgccgcccggggtgccccggccctggagcaggcccgcgtcgcacctgggacgtgtagggaccgctgccttcaagggccaggtgccctcaggagccacaggtaagcgcctcggggcgcgggggaagggtggccccggcgcgtaggtgcgggtgaggggcgctcccagcgccctgcaggtgcgccctctcgtcccccgctgcggaggtaactggttcgggaggttcattgtggaaggctgcgctcggccacccactcccttagctatgctgtcccttcccccagaggaccttgggcaggaacccgcctaccgccgagcttgtcctggaggtcacttctcagaaaattcagaaagtamaggtagaattctctttttctctctaacttttgttaggatttgaaaagaccagttttctagctactgaagcttaagcggcttcgctaaattcctgctttgggcagccgtggtggaggcctaatacggtgaaggggaggctggtgtccgcccaagtctgacaacctaggtgtggtgagcaaccttcttagtgcctggattttcttaaagggacgcttgactcccaggctgactgtgaaaagcggcaaggaaagctgttcctaacatcagaaaacggaatcattattgctgttttcatgttaataggttcagatgtcagtaatgcggtgttttgatttctgaattctcattgaatcttaaagaagtcctcaaggtgatctattcaaggcgatctattcaaggccacgtaatctcccctgtcttgtaaatgtgttctcttctccccaggcgagtttgaaactagggatttcttttttctttgatttgcaaaacttctttaaaatcccctcccctcctttatgcggtaaccagaggtgtctggtatgtagaccagcttacgaggcaaaacctcatttgagcagcagaaatacaaataattctaattactttcacgcatttcattctgattaagcaaatatgacgatttaaatatgataaatattagagcttttaaattcccttttagtcctggttctgaacttgtagtaggcatagagcagaaaaacatgatgaattaaaaagatataactacagtagataagggcagaaattgtgaggtgagaaaatatgtaaacaagtaactgaattacagtgccttcggtcttcatttccttgtcttcaaaatgaggacactagtgtgaaacagtttctgaactctcttccagtcttaggtgtgattcactcaaattaatgggagggtgttttcttccttatcaaatgaaaatgatttactttggatcgaaggtatttatttaatgggttttcaagttatttaatgtacagaatttgttaatcatcaactgttttcagttggagaatagtgggcaccaaattccttatttttgtgagacggagtctcactctgtcgcccaagctggagtgcagtggcatgaactcagatcactgcaacctctgcctcccgggttcaagcgattctcctgcctcagcctcccaagtagctgggattgcaagcatgcgccaccacgcccaactaatttttctgtttttagtagatacgggggtttcaccatgttgcccaggctggtctcgarctcctgatctcaagtgatccgcccgcctcagcctcccaaagtgctgggattacagatgtgagccaccacatccggcctcaaattctttattctatcattttacttaaaatcacctggctaaattacaaacccattgagtaggggaaaagaggaagtgcccttttagcagtaagggtaaaagggagttgtggcagtctacaaatcatttctgtaaggtrgctctgcttttyctcttttccattctttttttttttttttttttgagacgcagttttgckcttgtcccgcaggctggagtgcagtggcgcaatctcggctcactgcaacctctgcctcctggcttcaagattctcctgtctcagcctcccgagtagctggggttacaggtgcctgccaccatgcacagctaatttttgtacatttttttttttttttttgagacggagtctggctctgtcgcccaggctggagtgcagtgacgcaatcttggctcactgcaagctccgcctcccgggttcacgccattctcctgcctcagcctcccgagtagctgggactacaggcgcccgccaccacgcccggctaattttttgtacttttagtagagacggagtttcaccatgttggccaggcatttttttttttttttttttttaaagagacgggattgcttggcacgggggctcacscctgtaatcccagcactttgggagaccgagggggaggatcgcttgascccaggagtttgagaccggcctgggaacatttcaaaaccccgtctctgcaaaaaatgaccccttgtggrctgaagtgggaggatcgcttgcgctcaggaggtggaggctgtagtgagccatgatcgtttcactgtattccagcctgggcaacagagtgagaccctgtctcaaaaagagagggagagggagagagagagagagaggggaggggagtcagagagagatggggtctcactgtgttgcccaggataaggctagagtgctgtgcctattcataggtacaatcgtagctcactatagcttcgaactcatgggctcaaagctatccttctgcctcagtctcttaagtagatgggactacaggcacacaccatttttttttttttaattcaaagaaaacccagagcagttttttttaaaatggagaacctagcactaccttttctaggtgtgttacattgtctcgatattgtaaaccggctgaaactcaaaattcttgttgctattttcagggtcgaaaagtaattatcttaataggtacagcccccttaccatgataaaatctgtaatatctgtaggagaatgatctagtgttttgagaagtagtctcaaactactggatgaccacaccctgttcaatttgggaagggtaaaaaatattttagaaagtgctttcttctttgactcaaatctgcctccctattagttcaatagtatcattagataagtctgttcttccccctcatcaaaaagtaaaccagatttaagttactgaaaagtgccagttcattctatagcacctaggaaaatatttatatatgaaaaccacaaaatttaaacgcattacaaagtaggcattactcaattgaaatgtcactttccctcttaaagaagaaggaacaaaaactgaaaactcaagaacttggcagaaaattccatttagcattgttatgtcatgttctgtggttataaaccctgctgtttttagagttctrtgctttttggcaaaaataataaagtgtaccaactgcatcctttgtgtattcctgaatgtgaagctccccatttaagtgaaacagaaaggtgaagcaattaagacataggctttggggttatatagcactcacgttctagtccctcttccatagctagctgtgtgaattggactgtctcttaatttctacgtttcttcatctggacaacagagataacaatccttataatcggtgcactcctatagtctcagctacttgggaggctgaggcaggagaatcactacaagccatgagtttgaggatgaagtatgctgtgtttgcacctgtgaatagctactgcactccagcctgagcaacgcagcaaaactccatcttttttttttttttgagactgagtcttaccctgtcgccaggctggagtgcagtggtgcaatcttggctcactgcaacctccgccatctgggctgaagtgattctcctgcctcagcctccctagtagctgggactacaggcacacaccaccatgcccagctaatttttgtatttttagtagagacggggtttcaccttgttggctaggatggtctcaatatcatgacctcgtgatccgcccgcctcggcctcccaaagtgctgggattacaggtgtgagccaycgtgcccggcccaatgctcccttttatggaaccttagttccaggcctcaggttcagctttttcctattgtgaaaacccaaggccaaaacttccgtcccctgmaaggctcttagtcccctaggctttcgggttcctggcaatgactttgcctcttgggcagcatggtcttacragttagttacttgtgtttaagttttgggttcttttttttttttgcttgcctttgggcacctcctttattttgttatgagctcagccatgcatttgttgtatctgagtatttgaatatctgttgtaatttattcagcatctcggtgctttgtggtgagggacttttcacattatttacttggtaaactttctatgtaagtacagtttttttttttctggtactcaccatggctggaatgctcacattttcaacatataccccagtatcctragaacttctagagtactaatttcatctctggggaagagggatagaaattttggtgaaagcaatacaaaaaagtactattgattgaattctggcactgaaccaggactatgtgtatgttacctctagttcttataacaaccctgaaaaaataggtggtattattacaattttagggaaggaaaaaaagtttcagaaagtcctattgcagtaccctgcacctagtaaatttcagaggcaggattcagacttatgtcactggcttcagtgcttgcatgcctgttaacacctgttcttaaggttttccagggctttgagtggcccaacgtaaagcaataaccataggtcatttgcattcatatgttagagctaatgttatttgtaacattaaaaaatctatattatatttttaaataaaagtatctttagtattattagaatcatacaatgttctaaacaagtaaagatttacactaaaatgatggatggtgtgcatgtgcatgaatatcattaatgcttcttagaagctccttaaagatgggctctgaaattggaaccaggaaaagtttcttataagaatttccttccaagaacagcttatttatttttattttttatttttattttttgagayggagtctggctctgttgcccaggctggagagcagtggcgcaatctcggctcacttcaagctccrcctcccgggttcacgccattctcctgcctcagcctccagagtagctgggactacaatcgcctgccaccayrcccggctaattttttgtatttttagtagagacggggtttcaccgtgttagccaggatggtctcgatctcctgaccttgtgatccacccgcctcagcctcccgaagtgctgggattacaggcgtgagccaccgygcctggctccaagaacagtttaaagagcagtcagtggtttttttttttttttttttttagaaggagtttcactcttgtccaggctggagtgcaatggagtgaactcggctcaccacaacctccgcctcccgggttcaagcaattctcttgcctcagcctcccgagtagctgggattacaggcaagcgtcaacatgcctggctaattttgtatttttagtagagatggggtttctccaagttggtcaggctggtctcgaactcccgacctcaggtgatccacccgcctcggcctcccaaagtgctgggattacaggcgtgagccactgcgcccagcctagtcagtggtcttttaatgaatagccatgtaaacttgtggacctaagagcattgagagactcttactccacagtcacctgcttgcttgcattccttttctctgctgaaggaaatctaggttcatggttttaactggtaacagagaagaggaactggaatttgttgagggaacgggaacttgattgggggtctgcctgaggtcacctgctgttggagtcagtccttttacagggagataacatacatatagttctggttcagaaccagaattcaatcaatagtacttacttgtattgctcttactcaaatctcttttttttttcaaatacgcatttgctggaaaattgattgaaaaaggattagaacatgatgcatttattttttattttattttattttttgagatggagttttgctcttgttgcccaggctggagtgcaatggcgcgatcttgactcactgcaacctccgcctcctgggttcaagtgattctcctgccttatcctcccgagtagctgggattactggcatgtgccaccacgcctggctaattttgtatttttagtaaagacaggttatctccttgttggtaggctggtctcgaactcccgacctcaggtgatcckcccgcctcagcctcccaaagtgttgggattacaggcgtgagccactgtgcccagcctacatgatgcatttaaatatatggatgtggggctgggcgcagtggctcatgtgtgtaattccagcactttgggaggcagaagcaggcggatcacttgaggtcaggagtttgagaccagcctggccaacatggtgaaaccctgtctctactaaaaatacaaaaattagccaggcgtggtggtgggcgcctgtaatcccagctacttggaaggctgaggcaggaaaatcgcttgaaccgagggagcagagtttgcagtgagctgagattgtgtcactgcactccagcctgggtgacagagctagactccatctcaaaaaaatttaaaaaaaaagaaaaaatttatgcatgtgaaatgtggtgagagattcagtaggtttggacaggagcttatggatctgcatttttaaaaagtatattagataattctgatgatctgcttggcttccaaatgccattctaccagctgtttcagaattacttgggattgctaattaaaaatctctagccacacccttgayatagtgactcagaatctgaggggtagggttagagaagctgtttttttttgtttgtttgctttttgtttttttgagacagagtcttgctctgtcacccaggctggagtgcagtggtgtgatctcagctcactgcaacctccgcctcccaggttcaagcaattctctgcctcagcctcccaagtagctggtattataggcacctgccaccatgcccagctaatttttgtatttttagtagagatggggtttcaccatcttggccaggctggtcttgaactcctgacctcgtgatccacccgcctccgcctcccaaagtgctgggattacaggcrtgagccaccacgcccggccaagaagctgtatttttttttttttttttttttgagacagagtctcactcttgttccccaggctggagtgcaatggcacgatctcggctcactgcaacctccccctcccgggttcaaatgattctcctgcctcagccttccgagtagctgggattacaggcacctaccactatgcccagctaatttttgtacttttagtagagacggggtttcaccatgttggctrggctggtcttgaactcctgacctcaggtgatccacctgccttagcctcccaaagtgctgggattacaggcgtgagccactacgcctggccaagaagctgtatttttaacaagtgcccagacgatcctgatgtacaaccaggtttataagcttctgtgcattyccaaacatgggtaaaccccactttggtcctgaggacaggttgccragatttgcaggaataagacaaggaatgctatagattgtccctcaatacataatctgggccctctgcactttctggcatactttttgctcatttctgtttgactcctcattgcactttttctatctgttacaggtctttcctactttgttcttttgtctcaactccaccctctccctcttgaagtagacctgaatttgtgccgatacacaatttttatcagactggggtatctgaggtgagctcaamcgacctgtcacttcagacttggtttatagactcctttattgcagccctctcctttttactaatctggcagataaacccagtcctcagagacatttctcctctgttaccttccatggtttgcccctttactctcatttataggctattttttcccctcctcacccccaatgaggtaatcctagactttatttatttatttatttatttatttatttatttatttagttttgataaagagccttgctttgtcgcccaggctggagtgcgatggtgccatcttggctcactgcaaatttcacctcccaggttcaaacgattcccctgcctcagcctcctcartagctgggattacaggccacaccatcatgtccagccaattttttttttttttttttttgagacagartttcgctctcgttgcccaagctgtagtgcaatggtgcaatctcggctcactgcaatctctgcctcccgggttcaagcaattctcctgcctcagcctcccgagtagctgggattacaggcatgtgccaccatacctggctaattctgtatttttagtagasacggggtttccccatgttggtcaggcttgtcttaactctcaacctcaggtgatccgcccaccacggcctcacatagtgctgggttgacaggtgtgagccaccgcgcctagcctaatttttgtatttttaatagagatggggtttcgccttgttggccagactagttttgaattcctagcttcaagtgatccacctgcctcgacctcaccatcctagaytttaaaccttgaaattttctagagctgcctcccagtgactttaacttactgtgtggayctgccttgctgccctcacttcttcatcttctcaccccgtcctcaccacttccttgtcttcttttggactggcttgtgtttacaacattggattagcagttgtaaggtcagcaatgaattcccaaatagcattcagcacctattttcagcccttcttaatttttctgtgacatttgtacctttttaaagctcttttcttggttctgatgacctgagatatcttgattttcytacctcattggttcttcaactttcttcctctggctttgccattttctcctttctcctcgtcttcattgggggtcccatctgccctctgggaaggttcagcagagggtatctatacctactccgcgttttcaagggcctgcttaatgaatataaatgctccaagggcaccaaatcacaatttctttttacattgcaatccagccccttctcctgactttccttggcaattttactaacctagctcttgtttggcttcaaattctgttttaaaatggaatctacctgctacccaatgagctaccagttcttatcagttttccttcatttcacattgaatgtttttgccttatttttggcctatttctcaacaatagtgttgctattcattctatataactctttcctccccccagtaatttttcttttttttcttttttttttttttgagttgaagtctyactcttgtcccccaagctggagtgcaatggtgcgatctccgctcsctgcaamctccgcctcccaggttcaagtgattctcctgcctcagcctcccaagtaggtaggactacaggcgcctgccaccacacctggttaatttttmtatttttagtagagacggggtttcactgttggccaggctggtctcaaactcctgacctcaggtgatccgcctgcctcggctttccaaagtgctgggattacaggtgtaagccactgtgcccagcctccccccagtaatttttcttaaatctgagtatggatcatatctttgccatagtcaaaaaccttccatgtctccccagctgcctgttactgatgtctgtgatgggatccagaaataattgccttagtgattgattgttggttaaaccttaccagtaacccctggaataggtatatcttttaaaatccacacaaatatttagtcttatttgaactatgaaagctagactagtcatgcattgatcacactttagaagttgtgtgtatgtttgttttcaggaatatatttggcatcatttggtccagtcgcagtagctcacatctgtaaaaccagcagtttgggtggccacattgggaggattgcttgagtttaggagttcaaaatcagcctgggtaacgtagtgaaaccttgtcttgtctctcaaaaaaaaaaaaaaaaaagtcaagaaatttgccagtatggacctggtgcggtggctcacgcctataatcccagcactttgggaggccgaagcaggtggatcatgaggtcaggagattgagaccatcctggttaacagggtgaaaccccatctctactaaaaatacaaaaaattagccgggtstggtggcgggcgcctgcagtcccagctactcgggaggctgaggcaggagaatggcgtgaacctgggaggtggagcttgcagtgasccgagattgtgccactgcactccagcctgggcgacacagcgagattccgtctcaaaaaaaaaaaaattgccagtatggcccgtagtcttagctactcaggagggtgaggtgggaggattgctgaagtcccaaagggcgaggctgaggctgcagtgacctgtgatcacaccactgtattccagcctgggcaatggaatgagactgtgtctcaaaaagaaaaaaaaaaagaaattggcatcatttgcagggcattgtcttgaatttgtcatckgttcttgaattgcagttgacagtgtaggcattagcaccagcaagtgttctgggagcccacagtcaactttgtattattgcctcacttaagcgagaatagagtgaaaacaaacccagttgctgtgcccgtygcacatgcacatccgttcattggaattaaactgtcagccttcatcaactgcagtgtctgtggaaaccagggagctaccacagttctgggaaccgcactgagcctcagtgcaactttgaacaaaatgccaaatgtccaccctgctctgcaaggctggggttgtcccctggagcctctgacagggttttgttttaggccacatgttaataatagtcttaaaaagcacaatgactttacaatgaactcttttttttttctttttttttttttttttgagatagagtctcactctgtcgcccaggctggagtgcagtggtgagatatcggatcactgcagcctccgcctcccaggttccagcgattctcttgcctcagcctcctgtgtagctggggttgcaggggcgccaccacgcccggctaatttttgtatttttagtagagactgttttttaccagattggccagactggtctcgaactcctgacctcagtcaatccacccggctcagcctcccaaagtgctaggattacaggtgtgagccactgcgcccggccgctcatttgtatttttaaaacatgtgggtgggacgcggtggctcaagcctgtaatccctgcactttgggaggccgaggcggacggatcacgacgtcaggagttgagaccagcctgaccaacatggtgaaaccccctctctactaaaaatacaaaagttagccgggcgtggtggcacacgcctgtaatcccagctacacaggaggctgaggcaggagaattgcttgaacccgagaggcagaggttgcggtgaggcgagatcgcgccgccacactccagcctgggcgacagagcaagactccgtctcacaacagcaacaacaacaacaaacacatgctaggaggtgaaaagtcagcatgtggaaccatataaattataagataccccaaattgaagaatactgaggggtcattgcttaccatttcaagtacaatgcggtataaaaatcaactcaaaaaggcatactggttgagtgcagtggcttacgcctgtaatcccagcactttgggaggcgaaggtgggcaaattatctgaggtcaggagttctagaccagcctgaccaacatggtgaaatcctgtctttactaaaagtacaaaaattcacagggtgtggtggcgggcgcctgcagtcccggctgctcgggaggctgaggcaggagaatctcttgaacccaggaggtggaggttgcagtgaaccgagattgcgccactgaactccagactgggcgacagagcgagactccatctcaaaagaaaaaaaaaggcrcatakagaaaaagcatacasatttattaacgtgcacacgtgagaatcacagaatgattgcccagtatcccaatggggcccaaatacttacatawtcttatttcagaggggaagaggagatagggaatattggtattctgctgagtaataattgattactgtggagaatgaatggatgagggaacagagactgatgtgtaaatgattctctttggaaatggagtgatcccgagaggcagacgttattttgtagaaagatctgattaggtctggttacattcttggtcatcttttctgcagtagattgtgagataatggagagaaggaaaaagtattgtttttgttgggtctatctggtgtttatgtagacagaggaaaaatctattcctaatacctgttgatttttaagggcttttaattcaaaatactcattatctcaggaggctgtgttttggggtggaaattccttgcgctccttcaattggaagttatgaaattgttataggctgggtatggtggcccacacctgtgttccagcactttgggagacctaggtggaaggattgcttgaacccagaagttcaggacccggctgggcaatagggagtcccctttttgttttgttgttgttgttttgagatggagtctcgcgccatcgccaggctggagtgcattggcgcgatgtcagctcactgcaacctccgcctcctgggttcaagcgatcctcctgcctcagtctccaccacacccatctaattttttgtattttttgtagagacgaggtttcaccatgttggccaggatggtctcaatctctagacctcgtgatctgcctgcctcagcctcctaaagttctgggattacaggcatgagccaccgcgcctgtccagagaccccttttctagaaatttttttttttttttttttttttttaattagccagccatggtggtgcatgcctgtggtcccarctactcaggggactgaagtgggaggattgcttgagtttgggaaatcaaggctgcagtggagccataattgcgccactgcactccagcctgggtgacagagtaagactctgtctccaaaaaaaaatttttttwaaattatagccaatttgattaaaaataattaccaacagggtgggggctaggggagggatagctttaggagaaatacctaatgtagatgatggtttgataagtgcagcaaaccaccatagcacatgtatacctttgtarcaaacctgcacgttctgcacgtgtatcccagaacttaaagtatatataaaaaaaattaccaaaaacctatttatagaaaaaaaaacttttaacaaaatgatcttcgtttactctgcagaaagttggctaacatgtaacatttacgtgctgtgtaaattatgccgtcatattaatgtgctgtgtaaattatgctgtcatattaatgacttaccagtatgttagcagtattggtaattttcatcctagaaaggggaatataatgcataattttaataccactgttgtgtctaagagaagcgttcagaggaaggcacactttggactgtgctgcatgcatctttggggaaaactgaacatgtaatttgtgccctcaaggtcatctgggagcttgtgtgtactggcttatgcatctggtgggagcagcagcctgctgacacaatctggaagtctccctaaaatgtataaaaccaagttataatccaaccaccttgggcgtgctttctctggacctctggagactgtacttcggaccatggtcacttatgtttggctcagaataaaccttaaatattttacagaatttgcttttttttgtcaacaggattgaaggcaattgtattctttgggggtccagtttctasgtagatgaaggaactacagagaacagcctcatcttgtacttttggacagaaagataactgagagataggggagcgaaggtcagagagaccttgaggatacttttttttttttttttttgagacggagtcttgttctgtcaccaggctggagtgcaatggcatgatcttggctcaccgcaacctccrcttcctgggttcaagggattctcctgcctcagcctcctgagtagctgggattacaggcgcccaccagcacacccagctaatttttatatttttagtagagacagtgtttcaccatgttaaccaagctggtctcaaattcctgacctcaggtgatccacctgcctcgacctcccaaagtgttgggattataggcgtgtgccaccgcacccagcctacttctttttttttwaaaaaattatttatttatttttgtgggtatagagttggtgtatatatttatggggtatatgaggtactttgatacaggcatgcaacgggtaataatcacatcgtggaaaatggggtaaccatcctgtgaagcattcatccttgtgttacaatccaattacactcttttagttataaaatgtccaattaaattattgactatagtcaccctgttgtgctatcaagtactaagtcttacttattctttctatttttttttgtactcattaatcatccccatttcccctcctccccagctgcacttcccagcctctggtaatcattcttctactatctccatgagttcagttttgatttttttagcacccacaaataagtgagaacatgcaaagtttgtctttctgtgactgacctatttcacttagcataatgacttctggttccatccatgctgttgcaaatgatatttattgatattttgtattttattcatttyaaatgtatttatttctgctctgatctttattgtttgttctaattttgsgttcggtttgctcttgctcttctagttctttaagatgaatgttaggttatttatttgaagtttttcttctttttgatgtaggccctcataggtrtaaatttccttcttagtactgctttcactgtatctcatagattttggtagttgtgtttccattattattgtttcaataaatttttcaatttccttcataatgttttcattgacccactgttcattcaggagcatattatttaacttccatgcgtttgtatatgttccaaaattcctcttgttatttatttgtagctttatttcattgtggtcagagaagatgcttgctattatttcagttttttttgaatgttttaagacttgttttgtgacctaacatgtcatctgtccttgaggatgatccatatgctcaggaggatgttctgtagccattggatgaaatgtttcataaatacttattaggttcatttgttctattctgcagattaagtctgatatttccttgtttattttctgtctagaagatctgtccaatgctgaaagtaggatttagatgtctccagctattactgtattgggatctgtctctctttttttttttttttttttttttgagacagagtctccctgtgtcacccaggctggagtgctgtggcacagtctcggctcactgcaagctccgtctcctgggttcacgccattctcctgcctcagcctcctgagtagctgggactacaggcacctgccaccacgcctggctaatttattgtatttttagtagagacgggtttcaccgtattagccaggattgtcttgatctcctgacctcgtgatctgcccgcattggcctcccaaatgcggagccaccaggcgtgagccaccgcgcccagcctctttctttagctcttaataatatttcctttatatctgggtgttacatcctcttgctgaatggacccctttatcattatatagtgacgttatatgtgttttcttacagtttttctcttgaaacctatttcatctgatataagtatagctactcctgctctttttttgttttcattggcatgaaatatctttttccattcatttattttcagtctatttgtatctttataaatraagtgtgtttcttttaggcaacagctcattgggccttgcatttttatccattcagcctctccatgtctttgtgttgtgtgtcacccaggccgaagtgcagtggttcaatctcagctcactgcaacttctgcctcctgggctcaagtgatccttttcttcagccttccaagtaaagtagctgggactacaggtgtatgccaccatgcccagctaatttttgtattttttgtaaagacagggtttccctgtgttgcccaggctggtcttgaactcccgtgctcaagcaatctgctcaccttggcttcccaaagtgctgggattacaggtgtgagcgactgtacctggccaactgtatgtcttttgattagagagtttagttgatttacaatcagtgttattattggtaggtaagcactactcctaccattttatttgtcttctggttgttttttggtcttctcttcyttctttccttctttcctgtcttccttttagtgaagatgattttctccaatgttacgctttaatttctttttattttttgggtgtccattgtacgttggacatgcacacaatggacacacataaaacacaacaattagtattcggyttgcaaatactatctcgtaacccattattttaaatggatgacaacactgattgcagaaataaacaagcaaaaaagaaaatgaataaaactatatactttaactttctcctccccttttaacttttgtttctttttatgtcttattgcactgtctatatcttgaaaagttgtagttattatttctgatkggttcatggtttagtctttctacttaagagtatttcacacaccaaaaattgccatgttatattcctgtttttctgtgtgccattaccagtgagttttgtaccttcagatgatttcttattgctcattaacgtccttttctttttctttttctttttttttttttgagatggagtcttgctctgtcacccaggttggagtgcaatggcacratctcggctcactgcaacctccgcctcctgggttcaagcaattctcctgcgtcagcctcctgagtagctgggactacaggcgcatgccaccacgtctgctaatttttgtatttttagtagagatgaggtttcatcatgttggtcaggctggtctcaaacgcctgacctcgtgatccacccacctcgtcctcccaaagtgttggaattacgggcatgagccaccgcgcctggcctaacgtccttttctttctgattgaagtaccatttagcattttttgtaggacaggtctggtgttgayaaaatctctcagcttttgtttgtctgggaaagtctttatttctccttcaagcttaaaggatatttttgctggatacactattctagggtaaattttttttttcttccgcattttaaatatgtcatgcctgtaaggtctcctggcctgtaaggtttccactgaaaagtgctagatgtattggagctccattatatgttatttatttatttattttctgagacagagtctcactctgtcacccaggctggagtacaatggtgcgatcttggctcactgcaacctctgcctcccaggttaaagtgattctcatgcctcagcctcctgagtatctgggattacaggtacatgtcaccatgtctggctaatttttgtatttttagtagagataggatttcctcatgttgaccaggctggtctccaacgccaggcttacyaattctttcttctgcttgatctgttctgctaataagagactctgatgcattcttcagtatgccaattccatttttagtttctgcataattctttttagttatttcagtctctttgttacatttatctgatagaattatcaattccttctctgtgttatcttcaatttctttgagtttccttaccacagctcttttgaattctttgtctgaaaggtcacatatctctgttttttccaggaatggtccctggtgtcttagttcttttttttttttttttttgagacagagtctcrctctgtcgcccaggctggagtgcagtggcacaatctcggctcattgcaagctccacctcctgggttcacgccattctcctgcctcagcctcccgagtagctgggactacaggcgcccgccaccacgcccrgctaattttttgtatttttagtagagacggggtttcgctgtgttagccrggatggtcttgatctcctgacctcgtgatccgcccgcctctgcctcccaaagtgctgggattacaggcgtgagccaccgcrcctggccctggtgccttagttctttgggcgaggtcatgttttcctggatggtcttcatccttgtagatatttgtctatgtctgggcattgaagagttaggtatttattgtagtcttcactgtctgggtttgtgcccatccttcttggaaaggcttttcaggtatttgaggggatgtgggcccaaactgaataactctgtggttcttgccgacttatagaggtaccaccttgatgatcttagataagatctggaagaattctctggattaccaagcagagactcttgttctcttcctttattttctcccaaacaaatggagtctctctctgtgctaaaccacctggaccttggggggtggggtgtcaccagcacaccgtggccaccacaactgggactgtaccggttcagaccygaagccaggatagcactcgatcttgcccaaggcccggtgtaaccactacctggctaccacctaagtttactccaggccctaggactctgcagtcagcaggtggcaaagccagccaggtttgtgcccttccctccagggtggtgagttcccctaggccccagattggttcatagatgctgtctgagaacaccagggattgaagtcaaaaccttagatatttacctggtgttttgttctactgtggttaaggtggcacgtgacccacaagacaagttgcttcccactcttccctcccctttccacgggcagaagatcctctccctgtggctgccatcaccactggcttatgkgggggttctgccaggccatcactgatacttaaagcctaagggctcttcmgtcagcttgtgaccaatgctgccagctctgggactcaccttttggctcagggcaggtccagaaatgctgaccaagagcctaggcctggactcagtgacctcagaagtctgcttgttgctctaccctctgtagctgagctaatacctgaggtgcaagacagagagtctcctttattttccccctgcttttctcaaacaggagtctttcactgtagccctcacagctgggaatgtgctgggtcacacctgaagccagcatgtctcagagcccagtgcctatggtatactacctggatagtgctgttgataattcagggccttggcgctctttagtcagcagggggtaaatcctgccaggtttcctctgtgacagggcagcactgagttaagttaaagtgccccagtcactgcattctccctctactaaatgcacagatttctccccaccacgcagccactgctggggrtgggggaggcatggcagaagcactcccttagtcaccctggctggtgtcttagtaggytgtgtgcctcctactctagtccactggctctgggcccagcttagcactagggcttgcctaggaattgcagtccttgtggcctaacctgcccctcaagaccacttagggccccagagcactctggcctgtggttgtgaggcttgtgggaactcaagctctgactgctatggtgggtgatttccctctggctaaggccagtccaaatgctccttccgtggttagatgtcatctgagtgcagcctggttctgcttatcactgacagggcagcactgagttcaaagcaaagcctcccaactgctgtgctgtccatctcccaaaagcacaaaatctgcacgtgtggccactgctgggagaagggggagggctggcattggcacttcaagactgtctttcctattctcttcaatgtctctttcagtgatatgaaattaaaaccagctactgtgaatgctcacctgatttttggttatttgagatggctgccttttgtatgtagttagttgttaaaatttgatgttcctcctgggggtgaggggggtgacaaacagtgtaggcttcttctattccatcatcttgctctgcccctgtggctgctgccttagttcagcatgccaaagtgccgtattttggggtattgttttcatgccctaacagttccttgtggcagcttttgtgtatctctaatctaatgcttgtctcattggatcatgtttgtttacaaggatctagcacctactacaagttactgccctaggtgcaagctcttccgggcatgtctttccgttccctttcaatccctctggcttagcccttgcctccctagccccttccaaaactgccttttattgctgaccactttcctcagtctttccttctgtgctgtcttgagcaaccccagttttatgtttagaaaattccctaaaacctgaatttcaacacagacccacacagttttctgcatgaagcctggctttctcccacattactgattccctggtgacactcaagtgacggttgttcatcttttatgacccacatatctcctggttgggacctgaggtcagccctcttctagctttccctgactagaaaaaattcctcctgctttcactgttgtcagtcacctcaatttcttcaccaaacttcttgtttttgctctgtgtctgccctatagcccctaattctgtagtcatccattgctcctcaagggcctctcaaagtccattcaggggctcaatagatattgaataaacagaagaaccccaaactagttggtacattttggttcaatgtaataattattttttactttttatttttttaaagagacagggtctccactctttcacctggactggagtatggtggcatgatcatagctcactgcaacctcgaactcctgggctcaagtgatccttctgccttggcctctcaaagtactgggatttaccagcattagccaccatgcccaaccaaacataagaattttctaccaacactgtcagaaagtggaattagggttctgcagtgatcatgagtttcttaataatgagggatattcaaggagaggctagatgacttagtggctttgctatagaggagatggaatgccagatgtaactctttctgacctgtaatcccagcttgcaaactaaataacatcagtggtactcagctttccttgtgtgtctacaccatycatatactcgcatcagcaatgtgtagcaattttgtgctggggtgtattagagaatagtatactttttgttctctttgagtattcatggactggactttctttatgtcccttttagtttaacagttccaattttcttggcatcctttctgatgttgtcgtagggccttatttcaagagcatgctggtctgtaggatctggctgctcctccactgaaagcccccagaatgctttgttacattgtcaggaatttctgtatttcttttatcttgtagctttctctatcatatcccatttccactgtcctctcttctttcacagccattttcttcctctttctttgctcattgttttttcattattaggacttggctttttaggtcaagactcctrataaaaggactcctttcttctgctgttgccttaccagtcacatatgtggtgctgtctctagtgggctttgctttaaaagcaaaaaacaaaaaaccaacaacaacaaaagcaaaacaaaagcagctatgcatgtttagaaactggattttagttcacagcttgtatagaaaaagatgagactataggccgggcgcagtggctcacgtctataatcccagcactttgggaggctgaggcaggcggatcatgaggtcaggagatcgagaccatcctggccaacgcggtgaaaccctgtctctactaaaaaaaaatacaaaatattagccgggygtggtggcgggcacctgtagtcccagctactcgggaggctgaggcaggagaatggcgtgaacccgggaggctgagcttgcagtgagccgaaatcatgccactacactccagtgtgggcgacagaatgagactctgtctcaaaaaaaaaaaaagaaaaagatgagactataaaacatctgatgcttggaatattgctgttactgttttccatctcttaatctatttcattcaatctaaaatgtgcatttttttttcacattgaagcatctctgaaattgggagctgcttttttttttttttttttttttgagacagagtctcgctttgtcacccaggctggagtgcagtggtgggatctcggttcactacaagctccgcttcccgagttcacgccattctcctgcctcagcctcccaagtagctgggactacaggcgcccgccaccatgcctggctaattttttgtatttttagtagagatggggtttcaccatgttagccaggatggtctcgatctcctgacgttgtgatccacccgcctcagcctcccaaattgggagcttcttaaattggcagtattttaaaaattatgtgacattgaaatgtagattggcctaaattttaaaatgtagttgcacagtatttactgcctctagataatagtttattaaatactctcccagactatataactgagaaaatacactaacaaattcccctcccmcttttctaaattaaaaacatagtatatatgaatatcattttcatatatcttgctacttccttagccttcttaattataaacttgagtcagctattatttactgagtrcttayattttagatgctgttctaagtgctccacatgtataaacttgcttagtcatcacgagtgggaactattaccctcatcgtacagaagaggaagcagaagcccataaagtttaaatactttctccaagttcacatggctagtaggtgggggagtgacgatttaaacccctgctcttaatctctgtacttttctgtctgatgtaaatttcttattgccctttttttaatatcactgaacttgaggatattgtttatctttagcaatggaaaaatcatttcctcctgatattctttatccagtttgtctaaagtctaaaaaacaaaacaactctttggtttattactgggtgaaccccaaaattgggattcggccagagaggccayatgggttctcggcttcctccaggaaagaattcaagaacaagctgacagtaaagtgaaatcatgtttattaagaaagttaaggaataggccagcacggtgactcacacctgtaatcccagcactttgggaggccgaggcgggcagatcactaggtgaggagatcgagaccatcctggccaacatggttaaaccccatctctattaaaaaatacaaaaaattagccgggcgtggtggcaggcgcctgtaatcccagctacttgggaggccgaggcaggagaattgcttgaacccgggaggcgaagcttgcagtgagccgagatcacgccactgcattccagcctgggcaacagagtgagacttcatctcaaaaaaaaaaaaaaaaaaagaaagaaagtgaaggaataaataaaaggctggctactccataggcagagcagccccatgggctgctggttgactatttttatggttatctttgatcacatgctaagcaagggatgcattattcatgagttttccaggaaagaagctggtagttcctggaaccaagagttcttcccatttttagacaatatagagtaatttccaggagttgccagcatctgtaaatttactgtcatggcactggtgggagtgtttttttttttttctttttctttttgtccaccttttccctacttctaccattctattctctacttccatgaatttgacttttctaaattccacacataagctgagatcatactgtatttgtctttctgtgcctagctcatttgacttaacataatgttctctaggttcatccatgctgttgcaaatgacagaatttcctgctatttatttatttattttttgttatactttaagttctgggatacatgtgcagaacatgcaggtttgttccataggtatacacgtgccatggtggtttgctgcatccatcaacccgtcatctacattagrtatttcttctaatgctatccctcccctagcccccaaccccctaacaggccccggtrtgtgatgttcccctccctgtgtccatgtgttctcattgtacaactcccatatatgagtgagaacatgcggtgtttggttttccgttcctgtgttagtttgctgaagacgattgtttctagcttcatccatgtccctgcaaaggacatgaactcattctttttttatggctgcatagtattccatggtgtatatgtgtcacattttctttatccagtctatcattgatggacatttgggttggttccaagtctttgctattgtgaatagtgctgcagtcaacatatgtgtgcatgtgtctttatagtggaatgatttataatcctttgggtatatgcccgataatgggattgctgggtcaaacagtatttctggtcctagatttttgagaaatagccatactgtcttccacaatggttgaactaatttacactcccaccaacagtgtaaaagcattcctatttctccacatcctctccagcatctgttgtttcctgactttttaatgaatgcyattctaactggtgtgagatggtatctcactgtggttttgatttccatttctctaatgaccagtgatgatgagctttttttcatatgtttgttgcctgcataaatgtcttctttagagaagtgtctgttcatatcctttgcccactttttgatggggttgtttgtttttttcttgtaaatttgtttaagttctttgtagattctggatattagccctgtgtcagatggagagattgcagaaattttctcccattctgtaggttgcctgttcactctgatgatagtttcttttgctgtgcagaagctctttagtttaattagatcttatttgtcaattttggcttttgttgccattgcttttggtattttagtcataaagtctttgcccatgcctatgtcctgaatggtattgcttaggttttcttctagggcttttaaggttttaggtcttacatttaagtttttaatccatcttgagtcattttttgtataaggtgtaaggaagcagtccagtttcagttttctgcatatggctagccagttttcccaacacccatttattaaatagggaatcctttccccattgcttgtttttgtcaggtttatcaaagatcagatggttgtaggtgtgtggcgttatttctgaggtctctgttctgttctattagtctatatatctgtttcagtaccagtaccatgctgttttggttactgtagccttgcagtacagtttgaagtcaggtagcacgatgcctccagctttgttcttttgcttaggattgtcttggctatatgagttcttttttggttccatatgaaatttaaagtagttttttctaattctgtgaagaaagtcagtggtagtttgatggggatagcattgaatgtgtaaattacttcgggcagtatggccattttcacgatagtgattcttcctatccatgagaatggaatgtttttccatttgtttgtgtcctctcttatttccttgagcagtggtttgtagttctccttgaaggggagaacttcacatttcttgtaagatgtattcctaggtattttattctctttagcagttgtgaatgggaattcactcatgatttggctctctgttattggtgtataggaatgcttgtgatttttgcacattgattttgtatcctgagactctgctgaagttgcttatcagcttaaggagatttggagctgagatgctgggttttctaaatatacaatcatgtcatgtgcaaacagagacaatttgacttcctctcttcctatttgaataccctttatttccttctcttgcctgattgccctggccagaacttccaatactatgttgaataggagtggtaagagagggcatccttgtgttgtgccagttttcaaagggaatgcttccagcttttgcccattcagtataatattagttgtggatttgtcataaacagctcttattattttgagacacattccatcaatacctagtttattgagagtttttagcataaaggggtgttgaattttatcgaaggccttttctgcatatattgagataatcatgtggtttttgtcgttggttctgtttatgtgatggattacgtttattgatttaagtatgttgaaccaggcttgcatcccagggatgaagccgatttgattgtagtggataagctttttgatgtgctgctggattcggtttactagtattttattgaggattttcgcatcgatgttcatcagggatattggcctgaaattttctttttttgttgtgtctctgccaggttttggtgtcaggatgatgctggcctcataaaatgagttaggggggattccctctttttctgttgtttggaatagtttcggaaggaatggtaccagctcctctttgtacctctggtagagttcagctgtgactctgtctggtcctgggctttttttggttggtagtctattaattactgcctcaatttcagaacttattattggtctattcaggaattygacttattcctggtgtagtcttgggagggtgtatgtgtccaggaatttatcartttcttctagattttatagtttatttgcatagaggtgtttatagtattctctgatggtagtttgtatttctgtgggatcagtggtgatatcccctttatcattttttattctgtctatctgattcttctttcttttcttctttcttagtctggctagtggtctattttgttaatcttttaaaaaaaaccagctcctggatttattgattttttttttcatggttttttgtttctctgtctccttcagttctgctctgatcttagttatttcttgtcttctgctagcttttgaatttatttgctcttgcttctctagttcttttaattgtgattttagggtgtcgattttagatctttcccactttctcctgtaggcatttaatgctatgaatttccctctaaacactgctttagctgcatcgcagagattctggtacrttgtttctttgttctcatgggtttcaaagaacttatttatttctgccttaatttcgttatttacccagtagtcattcaggagtaggttgttcggtttccatgtagttgtgcagttttgagtgagtttcttaatcctgagttctaatttgattgcgctgtagtctgaaagactatttgttatgatttccattcttttgcatttgctgaggagtattttatttccaaatatgtggtcaattttagaataagtgagatgtggtgctgagaagaatgtatattctgttgatttggggtagagagttctgtagatgtctattaggtctgcttggtccagagctgagttcaagtcctgaatatccttgttaattttctgtcttgatctgtctaatattgacagtggggtgttaaagtctcccactattattgtgtaggagtctaagtctctttgtaggtcgctaagaacttgctttatgaatctgggtgctcctgtattgggtgcatatatatttaagatagttagctcttcttgttgaattgatccctttaccattatgtaatggccttctttgtctctcttgatctttgttggtttaaagtctgttttatcagagactaggattgcaactcctgcttttttttgctttccatttccttgataaatattcctgcatccctttattttgagcctatgcgtgtctttgcatgtgagatggatctcctgaatacagcacaccaatgggtcttgactctttatctaatttgccagtctgtgtcttttaattggggcatttagcctgtttacatttaaggttagtattgttatgtgtgaatttgatcctgtcattatgatgctggctggttattttgcccattagttgatgcagtttcttcatagtatcaatggtctttacaatttggtatgtttttgcagtggctggtaccagttgttgctttccagatttagtgcttccttcaggagctcttgtaaggcaggcctggtggtgacaaaatctctcagcatttgcttgtctgtaaaggattttatttctcctttgcttatgaagcttagtttggctggatatgaaattctgagttgaaaattctttactttaagaatgttgaatgttggtccccactcttcttctggcttgtagggtttctgcagagagatctgctattagtctgatgggctttcctttgtgggtaacccaacctttctttctgtctgcccttaacattttttccctcagttcaaccttggagaatctgataattatgtgtcttggggtcgctcttctcgaggagtatctttatggtgttctctgtgtttcctgaatttgaatgttggcctgccttgctaggttggggaagttctcctggataatatcctgaagagtgtttttcaacttggttcagttctccccatcactttcaggtacatcaatcaaacgtagctttggtctttttaatagtcccatatttctttaatcttgtcttgtgctttatttcattaagttgtcttcaatctctgatgtcctttcttccgtgtgattgattcagctatggatacttgttatgcttcacraagttctcatgctgtrtttttcacctccatcaggtcatttatgttcttctctaaactagttattctagttagcaattcctctaaccttttttcaaggttcttagcttccttgcwttgggttagaacatgttcctttagctcagaggagttttttatcacccaccttctgaagcctacttctgtcaattcatcacacttattttccatccagttttattcccttgctggtgaggagttgtgatccttcagagaagaggtgttctggtttttggaattttcagtctttttgctctggtttttcctcatcttcatgaatttatctacctttggtctttgatgttggtgaccttcggatggggtttctatgtgaacatcttttttgttgatgttgatgctattcatttctgtttgttagttttccttctaacagtcagggtcctctgctgcaggtctgctggagtttgctggaggtccattccagaccctgtttgcctgggtatcaccagtggaggctkcagaacagcaaagattgctccctcttccttcctctggaagcttcgtcccagaggggcaccctccacatgccagacagagctctcctgtacaaggtgtctgttgacccctgctgggaggtatctcccaatcaggaggcacgggggtaagggacccatttgaggaggcagtctgtcccttagcagggctcaagcgctttgctgggagatctgctgctctcttcagagctggcaggcaggaacttttaagtttgctgaagctttgcccacagctgccctttcccccaggtgctctgtcccagggagatgggagtttaaacccctgactggggctgctgcctttctttcagagatgctttgtmcagataggagaaatctagagaggcagtctggctgctgggagtgtcttttagcatgctaattagcatacataattataattagctataattagcagtgaggacaaccagaggtctcttttgttgccatcttggttttggtgggttttggcctgcttcttaccatgttttatcagcaaggtctttgtgacctgcatcttgttgaaacragtcctgccaaattcctatcaggtttactgtagttaatgaggccaaaaaaaaaaaaggacattttcaaggagaaacagaaacattattagaaaagattctgggctgggcgcgctggctyatgcctgtaatcccagcactttgggaggctgaggcaggcagatcacctgaggtcaggagtttgggactagcctggccaacatggtgaaatcccgtttctactaaaaatacaaaaattagccgggtgtggtagcaggcatctgtaattccagctacttgggagactgaggcaggagaattgcttgaacctgggaggggcaggttgcagtgagctgagattgyrccactgtgctccagccttggtgataaagtgagactctgtctcaaaaaagaaaaaaaaaaggaaagaagagattctggaggtagaaacaagaaatagtttcctgatctttgctgggcaaccgtacttttggtaatacttgattaactcaaatcctctattgctttctaggaacttgtttgactagattatatcgtatatcattagcagggtgacagttacctactaaattttgaagttatatgaataatctttattttcaagaatcttatgaattttatatgttctgcaaaaacaggtaaaacttcattcctcytttactctatttaaaaaaactgtaatggatggatatatataattgcgtgtgtgtaaaagtaatattaatatatcaatatcatgatcttactggtatatgtttttctaagagaatttttctaagagaattaggtaagcctttccccactcttttaacatcttagtataataaaaaattgagtgagagtattcacacccagagatactgtccaaagtagaagaactagcttcaagactgggaactgactagggtgctaattagagcccctctgtagtccttttatagaaaatggtaaactcaggccattgcctatgaaaacattgaaaagaagggaaggaggagaagggttctggaggaagcaaggaggaaactgccaatgatggtagtcattgttctgaagtcagtttggtgcccaatctaagctgattttcattgagagctaatgtccatttccaggttttggaactgaatgaacaactggtatgttttcgttaacctgggagattctctgtagccacaaaatgagcattggagaggtcgaaaaaaggaatagaaaattaaaaatcatataactcccacttgtagagagcagctgtcatcatataatgtcatgaatcctctctgattagctggcagcagatgtgttaggtgcttctctgcctcttgattatagcccctttctgtaaacttccgggaaaattatattggcggcaattgcgtgtatcactgatacatgcaaaagcccttatttcaggatatccactttttcagatcttttgtcaattgtccatttctggcataggtcctgagtcccagtgtaatttatactttttttcgtttggaaaagggttttttattctcactccttgttttgagtctcaaagctagttgcttacactcagttcgtgcaaatgctgtagtggcatatttagamgataggctttgtgtggacttttggaaaagtttaatagtttatgtctgcatgtttttctttatctaatctcccctcaacctgtccccaacaaatacattaagaaaataatttctgggccgggcgcagtggctcacacctgtaatcctggcacttgggaggctgaggcgggtagatcacttgagcctgggaggtggaggttgcagtgagccaagattgtgccactgcactccagcctgcgtgacagagcaagattctgtcttaaaaaaaaaaaaagaaaataattcccctttttttcttctaatattttctccttgctcatgagttaattgatacaattacacaaatagaattttatggtaaacctgaaaggtgtgactaatatgaagtttcagatatttgaaaccttttaagttttaaaaagtattgagctcatctcctttgagcctttacttaaacggatcttctggccgtctctgggcaccttatttaaaattgggagccctggttgggcacagtggctcatgcctgtaatcctagcattttttttttttttttagacagagtctcgctctgttgcccaggctggagtgtagtggcctgatcttggctcactgcaagctctgcctcctgggttcacaccattctcctgcctcagtctccccagcagctgggactacaggcgcccaccaccatgcccagctaattttttgtattttttagtaaagatggggtttcaccatgttagccaggatggtcttgatctcctgacctcgtgatccgcctgcctcggcctcccaaagggctgggattacaggcgtgagccaccgcgcccgaccaatcctagcattttgggacgccgaggcgggtggatcacttgaggtcaggatttcgagaccagcctggccaacatggtgaaaccccatttctactgaaaatacaaaagttagctgggcatgatggcacactcctgtaatcccagctactcaggaggctgagattgaacccaggaggcggaggttgcagtgagccaagatcgcgccactgcactccagcctgggtgacagagcaagactccatctcaaaaaaaaaaaaaaggtagtaataggggttggcccttcattttataaagttgagagcattatatacagagaagggttcttcatcacttttttagtcatttggtgaatccctttaacatgaacgtgaaccttcatgttaacattgtaagagcagtgactatacctgtcttgttctttgctgtctctccaacacctagaagagttcctggctcatattatttgttaaattaattgaatgagtgagtgactgaaatcctgttgagtgctaattttcaaaatacatattttaatgccagctcaatatataaaaacctagtttacatagaaactttatcaccttcttgcccctttaatattttctttgcctggtttccatatttttctggaataagatttttttttttttattttgagacaaggtctcactctgtcgcccaggctggagtacagtggcacaatcttacctcactgcaacctccacctccctggttcaagcaattctcatgcctcagcctccgaaaaagctgrgactacaggtgtgcaccaccacacctcgctaatttttgtatttttagtagagattgggtttccccatgttggccaagctggaatcgaactcctggcctcaagttactcacctgcctcggcttcctaaagtgctgggattgagccaccatgcccagcctggaataagatactttaacataaatttccttgtcagctgattcactttaaaaatacatttttctttttttttctttttgagtcggagtcttgctctttcacccaggctggagttcagtggctcagtttcggctcactgcaacctctgcctcccaggttcaagcgattctcctgcctcagcctcccgagtagctgggattacaggcacctgccatcatttttgtatttttgtagagacggggtttcaccatgttggccaggctggtcttgaactcctgacctcaggtgatccgcccacctcggcctcccaaagtgctgggattataagcatgagccaccgcacctggcctaaaagtgcatttttttaatgtagctttcaaaagtacatgttttatgtaacgaagcatcctctaattctagctattgaagttagccatatcacygttaattgttgctttgagacaaagttacatctttaaaattttgtatcatgggatgcaatgaaacatccttctgtaaagcaaagggattgactacctgataatatatttacttatttatttatttatttattattattwttttttgagacggagtcttgctctgtcgccaggctggagtgcagtggcgtgatcttggctcactgcgacctccgccttctgggttcaagcgattcttctgcctcagcctccsgagtagctaggactacaggcatgcaccaccacgcccagctaatttttgtatttttagtagagatggggtttcaccatgwtagccaggatggtcttgatctcctgacctcgtgatccgcccgcctcagcctcccaaagtgctgggattacaggcatgaaccactgtgcccggcctgataatatatttaaacctgaattgcacaacaagctgggccttccccttgattttctaagttcctcacagaccctgtctgttcctagctcttttatgatgttctaaaactttgtcgctgcttataaaatggaggagagacttactggtaatttgttctgtgtgagtttgcattagatgcttctaattcatagaaaagttgattatcctgtgattggagaacgaagactcaggtgagcagtaatagttttaaatacagttttttacagctagaatattgaaaatagtttctttctcccttcaagttggataaattttgtacacacgaaaaataagtttgaatttgtaggctaaattcatttcttagctccttagaaatrttaggccttttcaaagaggaaagccttaattacactgtattcctcaggaaggttatttccttcatgtaaattatgacttttgtgmttccagtagctctgtgatttcttcatgaatgtcattaacttaattgccttctcattgctttatgctagaaaaatgggaatgtgctttaaacttttgtagatattgacatttagaacatggttaacttgttaacaaggtacacatttattctgatgcaaaaatctacacaatgtgttgaggcaccatatgatgttttgaccagattttgtcagtgtgctatatatgagtcagaggattgaataagatgaaaaaaatcaaatatagtggtgaatgatacaaatttcttttctgagaggagcascttcgcttcatttcttttctttccttcttttcttttttttttcttttcttttctttcttttttttgcccaggctggagtgcagtggcacagtcttggctcaccgcwacctctgcctcccgggttcaagtgattctcctgtctcagcctcccgagtagctgggattacaggcatgcgccaccacgcctggctaattttgtatttttaatagagatggagtttctccatgtttgtcaggctggtctcgaactcccgacttcaggtgatccgcccacctyggcctcccaaagtgctgggattgattacaggtgtgagccaccgtgcctggccacttcatttctttaaagtgaaatgaaactagttgagagatctagctcaggagttagacaggcctgggttcaaatgctgcctctgctaattcacagatttgggtgagtcagtttctctcaggctgtttatttataaaatcaggataatcaaaggtctcatttcagaagttatgaaggattaaatagagtaatgctcataaaatgatatatttacatattcagtactcaataaatkctagctacaattaaaaaagtgtgtgtgtgtgtgtgtgtgtgtgtgtgttttaaatgactaagttggaattggccttttttttgkggtttccatcattcraacttattttattgatactcattagcgaatataattttgttgatttttttggtgcattatgacactttttgttagtgattacacaatgttgatcatttatttatttattgtactaartactgcaacctctgaattgccaatttttacatggtatttctggcagtgatgggtggccccgctttctgattacataaaatggtccatctagtccatggttttcatattcctttgtaattctacttactgctttaaaattcattcaaataaaaagatctaagttacttgcagtgagtgagtgcccaaatgcaacagcaaggagagctgagaacataactaaccaatactttcgtgttcaaagaataaatactctgaaacagtgggacagaagcttgctccttagggactttctcaaagtayccttggtggacataaggttatcctcactcaacggaaggacatatctgctgtcgggggaggacacagaatgacgatttcatttacctaggatattttccttctgtaaatgtctggaacaagttgtcactggacaccgtgatgtacagtgtagccctcctattagaataaataaattatgtggttggactggaatgctacaggcacactatgactggaagtggaaggagagagaatgtttatttaaaatacagcacacataaataataaataaaagtttaaaacttaatcagcaacagcaacaggaccagcctcccctgttccatttatggttcttttcaggaacacctgtatcttttcctaaggataaaaagtggcacaaggagacaaaaggctttggaaggaaagaaaatactttgttgtgactttgtgcttttctgaaacaagaaggcaaaacatgtgggcattgaatggctgcaataaaagactrcacagtgtccacacattggcaagcctcaggtttcagaggaagcactggagccagcagaatgccaaagccttgtttctcccttgaaccagtttggtgttacgcctggttgtgcttctcccgctttacttttactgttgataaatttcttaataagctttttccctatcccttttccctttaatcctatcgttaaaggtgtcttgggtctggtcttaaatcaatttggttatgacactaggtcccagaaaaaaagctgctatctcattagcagcttggtgtgttggaaattcatgtttgaaccacacagwgaacctacactaccagtaccattacttccctgcatataaaaaacaaaaaatgggggccaggcatggtggctcatgcctgtaatcccagcaatttgggaggccaaggcaggtggatagcttgagatcaggagttcgagaccagcctggccaacatggtgaaaccctgtctctactaaaattagccaggcatggtggcgggygcctgtagtcccagctatgtgggaggctaaggcaggagaattgcttgaacctgggaggtgaagtttgcagtgagccgagattgcaccactgcaccccagtctgggtgacagagtgggactccatgtcaaaaaaaaaaaaaaagggaaaaagaaaacaaatcacacagaacatgaaggggctgctgaacaatgcagcaggaatgtaaatacattctctttcgggtcagacgtttggccagacggctgattacaaaacataggatgacttcaagctgaaggtatgaaaacaaaaggttacacctcaaaacagaaatgactgttcattgaggcagagtagtgaaggtcttgaagaagctgggacacccataaaagaaagaaaagccctctgctcaggaaatccatgtcagctacacgtggctgagcacggaggctctttatgctccctatacgatgagcgaggcgaggtgtccaaccgcacccagatgtgttactgggcagcctggcccaggcctttttaaagatgtttgataaagctcatgtagcaactaccagagcttcactacacggatatccgtggtattcattgagtaaaaccagcagatttcacataagcagatgtttttatttgttcctaaagtcttagaaagtaatgttatattaacatgtaatatgaattccctgttactctttggatggtttgcatttgaccagtgtcttttcatttttagtaaaagyaaaattttttctagacataatcctgctattgatgttgaatactatttcatcttaccctgcataccacacaataccactgatacattgtatataccactgataacattcttggccactgggaaaattatttttttacattgttattggtctcctgtgttgtaggtaggactatgcaggaatggatcttttctttgagacagagtcttgctctgtcacccaggctggagtgcagtggcgcaatctcagctcactgcaggctctactctcgggttcaagcgattcttctgcctcagcctcctgagtagctggggctacaggcatacgccatcatgtccgggtaatttctatagttttagtagagactgggtttcgctgtgttggccagtctggtctcaaactcttgacttcaagtgatccatctgcctgggcctcccaaagtgctgggattataggcgtgagccaccgcgtctggccaggaatggttcttgaaccatttcttcccatcttagaaaatactgacttctcacttgccttattgaaatggtttggagaggtatagcatctaacaatactgcacttccatagagcggacttgggataacagttaactcctaagacatcagctgaagatgacaaaggtaaaaatatctrccgttaagataaagttgaaaactctgtacttactgtactttattcaaaatgttagccttctcttagcagattcttcaataagcttgcttttaggtttcaactgccttgagcagttgaaattaggagaggtatgtgaatgtatctgtaagtaagtggacacaggaggatgcttttagttgtttttttaattgtcaaattttatatactagtcacctaaaacatgttttttgtttgtttgtttgtgtgtgkttttttttttgagatggagtctcgctctgtcacccaggctggagtgcagtggcgcgatctcaactgcaacctccrcctcccgggttcacgccaatatcctgcctcagcctcctgaggagctgggactataggagcccgccaccacgcccagctaattttctgtgttttttttagtagagacggggtttcaccatgttagccaggatggtctcgatctcctgacctcgtgatccgcctgccttggcctcccaaagtgctgggattacaggcgtgagccactrcgcccggccctacaacatgttttaaaatatgaatacgttgtggaatgattcgatcgatttgaccagtgtcttcattttttgatcgagctaattaacatatgtattacctcacttataatttactaataattattatagatatcatgttgtacaatagatctattgaacttattcttcctatccaactgaaattttgtatcctttgaccaaacatttccccaaaactgcacccccaactcccagtgcctggtaactactattctactctsaacttctatgagtttaacttttayagattccacatatagttgagatcatgcagtatttgtcattttgtgtctggcttataacataatgctgtccagattcatccatcttgttacaaatgacataatttctttatttttaaaggccgaatagtattcccttgtgtatctatgccacattttctattcagctgttgctgaacacttaggttgattccatatcttggctattgtgaatagtgctgcagtgaacatggggatgcagataactctgacatactgatttcatttcctttggatacatacccagttacccagtagtgagattgctggattatatggccattctatttataattttttgaagaaccttcatactgtttcccataatggctatactaatttacattactagcagcaatgtacaagatttcctttttctctttgtccttgacccttgggagtttattacatgccttgaggtagtcttctttgggttaaatctgcttggtgttctgtaaccttttacttggatattgatatctttctccatgtttgagacattctttgttattatcccactgaataaactttctgctcctatcgctctctctgcctcctctttaaggccaataacttttagatttgcccttttgaggctagtttctagatcctgtaggtgtgcttcattttttttttctttagtctcttgtgtgtgttttcaaatagcytatcttcaggctcactaattcttctgcttaatctattttgctaataaaagaccctgatgccaattacattttttagcyccagaacttctgcatgattctttttaattatttcaatctccgttaaatttatcagatagaattatcaattccttctctatgttattttgaatttctttgagtttcctcaacacggctattgtgaattcactgtctgaaaggtcacatatytctgtttttccaggattggtccctggagctttatttagttcatttggtgaggtcatgtttccctggatgccgctgatgctcgtagatgttcttcagtatctgggcattgaagagttaggtatttattgtagtcttccttgtctgggcttgtttgtgcccatccttcttgggaaggcttttcaggtatttgaaaggatgtggctgttgtgatctaagctgtttctgctttagggggcaccccaagctcagtaatgctgtggttcttgcagactcatagaggtataatgccaccttgacgatcttggacaagattcggcaaaattatctggatcaccgggcagagactcctgttgtcttcccttactttctcccaaacatacagagtccctgtctctgttctgagccacataaagctgggggtagagtgacccctgtgaccaccactataactgaacccctgtggccactaccactatgactacacggcgtcagacttgaagccaggagagcactggatcttgcccaaggtttgctataactacttcctggctgctgcctatgttcgctcaaggccctgggtctctgcagttggcaagtggctaaaccagccaggcctgtgccattcccttcagggcggcaaggtcccccacagccagaagtcaggaactagaatcaaaaaccttagaagtctacctggtaatctagtgtattgcagctgagctggcactcaaaccaccagatgcagtccttcctactcttccctcccttttccaaaggcagaagagcctcatcccatagccactgccaccccttgccacaaagagtactgccagactactactgatgttcctttaaggcccaaggtctcttaagtcagcctgtggtgaatgctgcctggcctgggactcacccttcagggaagtgggctcccctctggcctgggcaggtccagaaatgccatccaagagtcagggtctggaaccagggaccccaagagctcgcttgatgctctaccctcctgtggcagtgttggtacctaaggtgcaagatgaagtcccctttacttttccctctgcttttctcaagcagcagttttgccctgtagctgtcacatctggtaatgtgctgagccttgcctgaagtcagcaagtctcagtggctacccaaagccctcagtgtagtacctgggtatctctgctggttattcagcgtctaaagtctcttcactttgctggtgatgaatgctgccaggactgggtcctttccttcaaggcagcgggttcccttgtgacccaggatgtgtctagaagtgtaatctgggaactagggcctggaacaggggcctcttgactctggactggtgactctgactacggtgccctttcctgctatggctaagctggtgtccaaaatgcaagataacgtcctccccgctttttcctcctcaagcagaagaaaggtgtctcttttggagctgcaagctgcgcaacctggaattaggggaggggtaatgccagcactcccttggctgcactagtttgtatcttagtatgttgcttgtccccctagtccactgtctctgggcctagttcagccctaggactcacctagaagttgcagtccttgtgacctagactgcctttcaagtttacttagagaccaaaagcactttggccctaggtttgtgggcactgggattggcgattcccctctggctagggctggtttaaacgctccctctgtgggcaggggtctgctgagtttggtctggttttcttttctgctctaacaggacagcactgagttcaatgcctcaaaattgttgtcttctcctccagtgtccagagatgctcttcacgccatgctgctgctctcagggtgggggaagggtggtgctggcaattcaggagtgttgttgtgttttttttttttttggttttttttttggagacggagtctcrctgtgtcacccaggctggagtgcagtggtgcaatctcggctcactgcaacctccgcctcctgggttcaagtgattctcctgcctcagcctcccaagtagctgggacaacaggcatgtgccaccacacctggctaattttttgtatttttagtagagacggggtttcaccgtgttagccatgatggtcttgatctcctgaccttgtgatccacccacctcagccccccaaagtgctgggattacagatgtgagccactgcgcccggccaggactgttttttctgtctcttcagtgcatgtttcactgtgatatgaagttaaaaccaggtactgtgagtgcttacctgacttttggttcttatgaaggtgtttttttctgtgtagattgttgttaacttggtgtccttgtggtggggtggggtgatagatggagctttctattctgccatcttgctctgcctctcccatctttcatccttttttttttttttttttttggagatggagtttcactctgtctccaaggctggggcgcagtggtgcgatctcactgcaacctctgcctcccgggttcaagcaattctcctgtctcagcctcccgagtagctgggattacaggcayaccaccacacccagctaattttttgtattttttgtagggacagagtttcaccatgttgcccatgctggtctcgaactcctgagcccaggtgatccacctgcctaggccttccaaagtgttgggattacaggcatgagccactgtgtccaggcttccatcttttatagtagccattctaacaggtgtgagatgatagctcattgtggtcttaatttgtgtttctctgattaatgatgttgagcatttttcatatatctgttggccatttgttgtcttgacagatgtctattcaggtattttgcccatgttttaatttggttgttttcttgctattagagttgaattctttatgcattttggatttaacctcttaccagatgtatggttagcagatatttcccccattccataggttgtctctttgctcttattgtttccttggctgtgcagaagctttttagtttgatataagtccatagtagggtgcttttagacataggcmcagtaacaggagttatgtctgacaatctgacatcaagaatagaaaaattggctaggcctgtagttccagctacttgagaagattacttcagcccaggagtttgagtctagcctgggcaacagaacaagacccctggtttttttggtttattgttgtttttagagatgggatctcattctgtcacctgggctagagtgcagtggtgcaatcatagctcactgtagccttgacctcctgggctcaagcagtcctcctgcgtcagcctcctgagcagctgggactacaggcatgccactaccatgcctggctgagatcttgtgttttaggttttttttttttttttttttttgaggcagggtcttactctgtcacccaggctggagtgcagtggtgcgatcacagctcactgtagcctcgaactcccaggctcaggtgatcctctggagtatctgggactacaggaatgcagcgccacacctagtggtggcgaaacatggagaagccctaatttttttgtatrttttatagagatgggatatcactatgttgcccaggttgtctttctctttaaaaaaaaaaagccagaatgaaagtgaatggtgcagccttcaagttcagtgttttgtattttattatgacaattttgaagaaggaaaaatatttatttcaaagagcctaaaaccaaactcaagcaataagttgtgatttttaaaaaatcgacagatttacttattttgaaaaacaattctatggagatgtagttcacatattatacaattcacccatgtaaagtggacaggctgactttgttttcttttytttttttttttttttgagacagggtctcactctgttgcccaagctggagtacagtggtgccatcatggctcactgcagtctcgacctcccaggctcacgcaatgctccacctcagcctcccaagaagctggaactacaggcatgagccaccacacctggcacattttaaaattttttatagagacagggtcttactatgttgcccaggctagtcttgaactcctgggttcaagtgatctcccaccttggcttcccaaagtgctggggttacaggcgtgacccactgcacccagccaacaggctgattttcaagatagaaaactttgacttgttttaatgcagttccatggaactctgaattaagcaatttttttttgttttgttttttgtttttgagatggatttttgctcttgttgctcaggctggagtgcagtggtgcaatctcggctcaccacaatctccgtctcccgggttcaagtgattctcctgcctcagcctcccgagtaactgggattacaggcgcccatcaccacacccagctaatttttgtatttttagtagagacggtgtttcaccatgttggccaggctagtctcgaactcctgacctcaggtgacccacccgccccggcttcctaaagtgctgagattataggtgtgagccactgcgcatggcctaagcaatgatttttgacaagaattttctcctttcaaaaagtgcttaattgtggcaaggtgagacctgaggtgaagataaaggatgggtgggtatttcttcagaattcagcagaaagatttgccaacctttaagtagacacgccgttccaaatttgtaataatgtaaatgctttctaccaaattgtgtaatgaatatatttgaaatggtgattgatattattaatagatatgtttgacttattagaatatcatttaccaacatttagcaaaatcgagatagaatagcaagggtcattgatgagtaagttccatgcagatatgtaccttcctgtaacatttaccagatggagacttttgggtgtgtgccaaaagtgatgaattaaccgtgaaagaatgtgagacaaatgaagtgtgaaggtagttcaaaggtccttaaagagacagaacagcccactcttgccttcataagatttgctagagaaagaagtaggtgcctagtaaagtatttagggaaatctcagtctggctagtccttacaagaaagaaatcctttgaaaggaatacaatattcataatgtgactgttttaaaataaatttttatatgtttaatatttgtaaaaagtcctcattgagattttcctctcttcatcttattttgccatttctgtggtataaaataggtttttaggaaatttgactttgatttactcgtggaccattgcttaggaatgattaggttgcaaattggggattgtctgtaagacaatggctttttatttgggtgaggactgaagaacacatctcatgataggattattgaataaaatctgttgtttctgtgaatgctgaaaatggcagttggaaaacatatttattgcatttcatcaatgggcctctgtgcattggctattttgaaattgaatttacacatttcaaatggtcatataagcagtcattttgtggaatgaagcataattcaagactgggagttgggctatactgcaagttatgaataagatacacactatttccaagggcctaaaatttctttgttaaacacagattcaaaataactgtaaggaccttctacctatggaacaaatttgcaagaaaagtccaaagactggaattttatttaaaattccttcatttgtagctaatttaaaaatgttactttggactgggtgctgtgactcacacctgtaatcccagcactttgtgaggccaaggtgggcagattgtttaagtccaggacttcgagaccagccttggcaactggagaaaccccgtctctactaaaaatacaaaaagttagcccggtgtgtagtcccagctactcaggagactgaggtgggagaatcacctgaccctagaaggtcagggctgtagtgagccagagatcaggcgactgcactccagcctgggcaactgcggtgagaccttgtctcaaaaaataaaaataaaatgttactttgttttgtggaccaagggaaacatgcctgtgggctagttcgaatggcctagacaaggtagggtagaaaaagtaatgtcttttttttaaccccactcattacaaggttcatggctggtgcactgctagggtctgagtgtttgtgtcgcccagcccccaccctcaccccctcaacatttatatgttgaaacctgaagcccaatgtaacagtaactaagaggcggaggcttcagtatgatgaatacgggggttatgtctaatggcagtacacacggtcgaggggtacttagcaaggcctgtttgttcagattcttttctgtgtccctgtgtctacagagataaagacattcctttcctccgggtataggaacagttcctgaaatgaggctgttaagacctacatcagggaaaggtcagttaggttttatggtctgcttcagggaagaagaggcatggaaacaggaaacaaacttcctgcttttgctgtttcctcaagtgccagcgtgccatattttggagtagcatgtcctgagccctatcaacagcatgcgcgtgattctgaggagaaacaggacacaataccttgttctacaagcttaaaagtgataatgcctagagcgcgtagagataccaaagacctgcagtggggacactgaggaacagcgcgtacaggaagtgatgttgatctggttcctggagcacaggtaggatttagcagtggtgcaatgaggggcatgcatcctgcccagagccggaagcacagtccagttattgtgagcagcagacagttcagtgtgttagcagccttgggctgtggaaatgttccaggtaacaaaaggataaggcaaagctgtccctttattttgtttgagtccctatatacacacaaaaccccccaaaataaatcatataggttaaaggaaactatgaaaatacaaagctgtgagaaagcttctttaaggcatgtctcctagctcatccagaccgatgactcctttgagaaaatttttctgtgtagtggagctgccactattttataggtagtcacccattttatctggggagtcattrggctgaaaataaaacccttgcttgtaccccttaccttaaaaaggatattggcttaggattggacaaatttaaatctttgrtcccttaaattttgttattccttcactggactttcatgttttagaaccatttttacatttctcagtgagtagtttatggggtgtggttggttgactcaaatagaggctactaaacttattcttttaacctttaacctttccagagttaaaatttactgtcattctttttaaacattagattcccgacttaaggtgacacagttataatatttacagtatcatgttgtattaaatgagatggcccatttgtaatatatgagataacctgatacaactcagaattaaatgtacaactgaaaggtttagcattctagtcctgagccatccaaattcgctcagtgacacaggtcagatcacttatgctgaatgacttgctttgttatttgcctaaattagagaagtgtaacttggttaaatacgtgatagggcaaggtttgaaacatacaaacaaaaatgctgtccctcccttcagtacaccgtgtctgatttgttcacttgagtccttagcatctactacagtgcttcacacatagcaggcactcaaatatttgttggttgaaatatatgtaagagagaagtacacctattttttctgtggtcattattagaggcagaaggtgtatattttcactgtttgtttttgtgtctgtgttggggaaggaacaaaccctaaaacctttacccattacagaaggaaagaacattggtacaagacgaactgttcagcaagaatagatttgaatgtctgatctgtccccaagtcttcagatgctgcagatgttaaccatggcctcttggatgccctcacttgctcattcattcactttgattgattcataagatgagcttgagttcatgccagcaagtaagccatgatcttagagggaaaatgactggaagcagatcacagtgcaatatggtgttagaggtattaggatggatagatgtagaaagtacagtgggagtacaaagaagggaagggagccatcatttttgtctgagcaaatggagcagagtcatatggactcatagaaaaaggggtgcttggctgggcgcgggtagctcacccctgtaatcctagcactttgggaggctgaggcgrgtggatcacctgaggtcaggagttcgagagcagcctgaccaacatggtgaaaccctgtgtctactaaaaatacaaaattagccaggtgcggtggcacatgcctgtaatcccagctacttgggaggctaaggcaggagaattgcttgaacccaggaagcagaggttgcagtgagctgagatcgcgccacggcactccagcctgggcaacaaataatgaaactccatcgcaaaaaaaaaaaaaagaaaaaggggtgattgagcttggacttgaggtaggaatgtgtgtttagcagggggaaggaaagaagatagaagggaagcagtccggtaacacaggagcagcctcatcacttcctgtaggctgcagtataggagaggatgtgtgggagggagtgcaaggtaaaactggggaaaaccagaaaccatgagacagctcctgagacagattagactgtttccaaagtgtggttagaacatgaatacattaaataataaataaaaccttcgttccactaagtgaactaaatgttgtatttttatgtaacttaatcatcttcataatgctcttggagagatagacagtattaacatttatagactgagaaactgagatatcaaagtcaggtaattacacgagatgtggttcctatatattattttttaatttcaaaaactatctcaaatatacagaaatttttttttcctaattgatttratagtaagttacccactgccccatcatttctgtatatttagtgcctttgtttttttgtcttaacaaacaaggacatgcacctacatagctgtaatatagctatcaaaaccaggaagttaacattgatccattattaccatgtaattcccagatcccatttaaagtttcaccagttgcaccaataatgcccttcatggcaaaaggatcaatttcaggattacccattgcttttagtatcctgtctatttaggttcctatagcctgggacagatccttagtctttccttgacttttatgacccagaggtgaaaggccaaatgttttgtagaatgtccttaaacttgggtttatctgaggtttccttgtgattgaattcaggttagacatctttgatgggactgtcatagaactgatgctgtgttctaattgcatcttatcaggtgacttatgatttctgyttgtcccattattgatgctgttactttgatcacttgattaaggtggtgtctgcctggcttctccagtgtgaaatttcttttcttctttgtaatattttgtggggaagtaactttaagactatgtaactgtttcatttcttttcttttcttttgagacagggtctggctctgttgcccagcctaaagtgcagtggtgcaatcacaccttacttcctgccttgacctcccgggctcaagggatcttctcactttagtctcccaagtagctggttccacaggcatgtaccactatgcccagctaatttatttttatttatttttttttattttatttattttatttttttgagatggagtcttgctccgtcacccaggctggagtgcaatggtgcgatctcagctcactgcaacctccgtctccctggttcaagcgattcttttgcctcagcctcccaagtagctgggattacaggcacgtgctaccatgcctggctaatttttgtatttttagtagtgacggggtttcaccatattggccaggctggtctcgatctcctgacctcgtgatctgcctgcctcagcctcccaaactgctgggattacaggcatgagccactgcacctggcctatttttattttttaaatttttgtggagacagtgtcttgccatgttgcccaggctggtcttgaactctcggatttaggagatcctcctgccttagccttccaaagtgctgggattacaggtatgagccaccatgccaggccacctattttttttatcacactttaagtttattcatttatatcagtgtgtagtcaccatttcctaataaattataatcttttacttccctttcaagctggcttctgttctcttttgacaagttcttataattctttgagcatgtctagctgacacaagatgttctaggctcatcttgttcttccctaccctgktactagmatcagcgatttctccaagagccctggtttcttagtggaaaagggtgtatacaaaccaagatctgtctgctaagtatgatcaaaggttgtttctcctttcaggctttcttggtgaacaaaggtagggaatatattcatacacacgtacacatttacatgttgtctctctctctaaaagtcatgaattgttcatactgacatatccacttctgatcttaccacaggattcattccagttttctcccttgccccatttgtaacttcttttcctgaaaatgagaaacctggttcctttatccctaacttacttacttagtcaatcctgctctgtgtaaccagtctcccattgctgctgctccctccctctgtgcagatgtcctatacacttgggccctgcctgacatcctgtgctgcagtgactgccacatggacacaccctcctcacttggcttgcacttggttctctttttaagtgtgacacatctacaaggactagacttcgcttataatttgggtgaagctttgcaaagagcaaaagttcttattgaggtcttgcctatctcctttaaccttaaattgcatttttttggtcagtccttctatctaattaattttctttttgtttgttttgtccttaactactatagtgatgaatatatttacctgtgggtattgattctcatatcaatggttatgcacattattattagacagctcgtgatatgttacataaatgttatatgtagtactttttaaggtataagtagtaaagccatatgtttctacaacaacataaaatgcaaagatgttagaccctgcttaaaagtcccatgtgtctgcctgtgatcctcatgattatggattgcatggagtctgtaatcatatcagagtgcccaatagaactagactatcacaaaatttatgattctctgattttaaaattatatcaaagagatcaccattagtgatttagtttcttttgtgtttgttattccttagaaaggtcttttttttctttgaaaaatgcatgaggtttgaaagttactacttaaggccgggctcgatggctcacacctgtaatcccaggagggatttggaaggccgaggcgggtggatcacccgaggtcaggagttcaagaccagcctggccaacatggcgaaaccccgtctctactaaaaacacaaaaaattagccgggtatagtggcagtgctgagatcactccattgcactccagcctgggcaacaaaagcgaaactccatctcaaaaaaaaaaaaaaaaaaaaaaaaaaaaargtaagttactacttaagatcatgctgatattctaaagataacaataacagagtttcctacctgcccgagctatgttcccgtggagatccttcttcaaaaacaagtcactttgttggacaatagaacttcctgaatgttttttattctatgcgcttaccctaatttataggaagctacgtaaatgtggacactctgtgaacaattgtttaatgactcccaaggttctgactgattaaaaagcatgctgactttaaagttctttttcttctttacatttccttttgttaagtctattctactgaagtaactcttctggaagccatcctgtttcactattatttttcagtgatttgggaaacagttgtataggaaaaaaatttatgtctttgcctgtggtacatagaaatttttgtggaattctcattgccagtaagtaccagacagaattcagatatcatctctcaatcgtaatgaatctagtggtcagtgttgcagccatcagtgggcagataactgttcctccaaaagcaagttaatgcattcatttgtctatgaatgaatttttgatagacaatatttaaatattggtagacaagtaggaagctactgaagaagtgattaatctgagtgtaggtatatcaatttgtaaatgcagttacactgcaaagtaatacaactggctgaattggttagatttacacacaaagtaaagcttcagtgatcacatggtaggtgaatgattttatttgagcattctccttgctttgaattctagtctactgttgtcctttgaaccctatgactcttaatagccaagagtgtattatggtaaagaataagtggggcgcagtggctcacgtctgtaatcccagcactttgggaggccgaagcaggaagatcatgtgagtgagcccaggagttcaagaccagcctgggcaacatacagatactctgtctcttcaagaaatgaaaaaattagctgggcatggtggtgcatgcctctagtcccagttactcagcaggctgaggtgggagatggcttgagcctagcaggtcgagggtgcaatgagcagtgattgtgccactgcactccagcctgggcaacagagtgagattctgtctcaaaaaatgagaatgcactagatacacaattttattgaactttctattatrgaaaatttcaaacttatgcaaagtaaagactagtatgacccccatttacccatcatccagctttgataattattaacacatccaaatagttttatgtaataaagatttataaaacgtgtgtgtgtatatatatctatattatatatatattttatwtatatattatatatatatatatatatrtatatttttttttttttttaaatgtagagcctcactctgttgcccaggctggagcagagtggcacagtcttggctcactgcagactccacctcctgggtttaagcaattcttgtgtctcagcctcccgagtagctgggatcacaggtatgcgccatcatgcctgactaatttttgtatttttagtagagatggggttttgccatgttggccagactggtgtcgaactcctggcctcaagtgatccacctgcctcggcatcccaaagtgctgggattacaggtgtgagccactgcacccagcctaggatctcttaatttatcattagtcctggataagaactccagtttggctgataaattttgtgtgctcatcctacagagaagcaaaatggtgttcagacagataattaacttgcccaacttgcttagaagaagcctaacttgggctcattgtttcaggctttcaaaaacttttttctataattattatcatactttattttttagattttcatttatctcattctttagattgaggagggaaggctcacacctgttgtatttactaatccacacccagtacctaactgaacaactgatgtatagagttcattaaatatttgttgaatgaatggatcaaaactatctttatattaggagtctgatttgcatctaaaaatattttaggtggtgttatttatttccttctcatcaagaataattccacggttttctttgtaagtggactcttgccaccagggaaagattgtggactcgatttctgtgagtgtttagctgttaataaaaagccccaactgaagataaaatgtgaaatgattaaaaaaaaaaaggtttatttcctaacctggtagccagttattaaattcctgatagcattgaggagaaataggcacactgataacgagacatgagagacaagttctctgtgttccaggagcagagcaatgttcttttctctaacattcacactggatgagtaatatgggagtgacttgaaggaatgagcatttgtaccgcatgcaagggtttttactctttctagtaccttcattaagggattagcctttcgttctttgaaatgcaaaatctcagttgcccaaaaagcagagtggaaatgagcagcatcctctcttccttaagagaagtggtctttcttctgtcacttaagacattttcctatagttgaggattttatagcaaagagaattttttaaaccaagttactggttaaaaactttttgttgttgttgttggtcttaatttcataggcacataggttagggccaatcactagtcttttctaagcttttattttttaaaaatcgctaatgctttaaaatactgtcaatgtgataggtcccagctgctgattccttcatactaaatgattgttttaagtaagttttgattcctgtttgtctttgattgtagtagttttgttttacttttaaaaattaaattcaataggatcataaagcatgcttttgaccaaatattttgctggtatcttgaattgaccgcagtacaatttagagtctcagaacattttcttttaagttgccttttttcatcctcagtgttcttgttctgacagtgtatcctgtgatttttaaatttttcttcctttctgggtgaagtgacagaattttaaagtgttttttgaaacatctggtgatctaaatacagtttgggggagctttgacctacttagaatggttctttgtgccagagagcatgtttattcccaaggtaactctgctatggaattgcccatgtgaatgcattgagacttgcaacttgccagatcttttattatacaaacacaatgaagcagcaggcagccaagaagaaacgaggaagattgcattgttcttgtacttccttgaattaagaagtttattcatctcagtattttctacaaatttctttgacaataacattgtgaatgaggatttagcagcaacagttgattgcatgtgtgttcattgtcagtatgtttgctctattgaaacacctttatgcattttgttcagtagattatacttatacataaaattttttatttatatttagagcctttttagacatatggctgtatcatgaagtatagtagtatattccttttagatagtttattttaaaataccaggataattgtatttaaacatatagtatagattttggaatattatattccatttctgtgatagcagaatatctatgccatttcttttatctcctcaaggttggatcatttgcagtagactttccctaatcagttcagtattttaacgtacaaaggtatttacccaaaaactagaaaatagagtcccttaagataataagcaggacatgttctgtgcagcttttatgaagactcaaatttgagggtatgtgatttttgttaaaattaaagactttttgtgaaatagaggtgtttttatgtacctttggcctctaggaggcagcatgatctagtctaagatttctgtatcctgaatcaggaaacttagtcctctgtcattttaagaacttccatgtatgaaaatatttgccttctgaatcataaagttatgctataaatgaattaaataatagcagatagtcacagagttctagactagattgttatcctgttattttctttgtgaatacttaaaaagcaaaaggaattattgtgattgctgtagtagtagcataacaatagaaaaagtaatcatttcagtggacgagtgcactttcagtttgcagaccactagtctccatccaaccttctcagctgttgtgtaaaaccctgcaagcattactgtcattaacagctgaagatatctttttctagctgatgtttttgctaaaatagtatgtcaagtgtttatttaaagataacttcaataaaatcttggcaaatattatagctctcctatagttattactaaaagctatctaaaattgcttgaaattcaggagataccttgtgcccattttttcactgtaatagtgtatacttttgctatgtgattagaatgtacccatgtgactattgccataatttgtggctgcaggggaacagagactaggcatgtatttgtaaggggacagtggatgaacagttaccctttagtcaatctatttttctttacttctttctgttttcwtagcacctgagtaatttctatttagtggctcacatgagactactgtagtaaaaggatactaccccttggttgttggaattgccagctttgggagaatttattctgctcaaaactcaaagataggttcagaaagcaaagtaactcgtgggaggatttatccataatcttattaatgagattgatgctgccaaatattatcattaatttaattttggatctgttttgatcaaaatgttataaagttcaggtcatgccctcatgccctagaatgtacttaatctagaaatacttgaccaaagtagtcaaaagctatactgaaagaattgataaatgtttagaaaaattagagctgctgtatatttctaaataattccagtagatcctcttccacaaaaagatgcagtcctttttaaaggaacaaataacctgccgttttcttgtttgagtggtctgtgacttccatctccccttttgtatttgaaacataaaggtcttcagtcagctaatgagctgggcttcttttgctttttctgtaaatgcttatttgaatgtgcattgtttctgtgttgacaggatgatatttgggacaaaatgaaaatgcgagaacaggaactggtgtatcctattctaagctctgtaatgagcaggagtggacttgatgaagggattgagttatttgaaaacctctagattttaaaaagcagaataaggcttctatcctcagttttttatttatttctacattatgtcattagaaagtttcttataagcaaatacataatttctaccaagaaaaacagtgaagttttaagtattccattttaacattgtttataattttttttttaactagaaatcagagatacatatgtgagacattttatagtttarcataagtgtgccttggcttgtttttgtccattaacttagttcaggactgtaacacttgaaataataatgcctaaagatgtcatgatcttaagacgaggaactgtagttactagattttccttactatttaccactgtgtttattttggaactagcttatcttatgcatgccacaagtatatgtcacaaatacactgcagtgtgcaaggaaaattttaatatctaattgctagggtcttttgcaagaaaagacagtttgtccttggtttattaaattagtatggaataacatgtactgttaacagtgtttattgagcttctgagatgtcttcagtggactcagaatacaaggattgctttytgtgggtgtgtgtaaatgtgtaaataaatgtttactggactcttactaaaatgatcagtttatcaggtactattaaaaatattacatggttatttgtgcctggaacagtatgtagcatataaaaatagaatgcaaattgcagtggaaaccagaaacagagtccctagggctgaaagggaccttggagagtatctggtgccttgatcttctagctctgctctaaggagcttgggtgtggagttctgctactgaaattaaataattaaataattaataattaatgacaggattgttttcttttaattaggtaacataatttcctcatttatgatttttcactttttttttttaattttcattattttctaccatttctctgcttgggagtacgagcctgaattcaaagtgaaataacaggtacaaatgaatacagattaagagggaaacctcaaacagccaattttttttgtagccttgtatgctggtagctgtgattttttctttgtttttctttttttttttcctatttgagacaaggtctcattctgttgcctaggctgaagttcagtactgtgatcattgctcactgcagtcttgacctccctgggctcaggtgatcttcccacctcagcctcctgagtaattgggactacaagtgtacgccaccatgctcatttttgtgtcttttgtgttttttttgtagagacaggattttgccatgttgcccaggctgctcttgaactgggctgaagtgatcctcctgccttggcctcccaaagtgctgagattacaggcctgagccaacgtgcccaggctgattttttaaatttctaatatatataatatggttgaattttccattcataagatatcccctgtgtgtgatagaactgaacttagctggtaaatcaatattttattttatcccactgaaacgtgttatgcaaagatcatcgtttgttaatttcaagtgctccatcgcccataacaattattggaactagtgatttggtccagtaatctcttttactaattaggcccagagagattgactttcttaaggttacttgacaaattagtgatagggtccaggttgtattctgtggcttataactttacattcattgttctagatttaacagcaatacttcacgggtacaactgaatttggagggagtttttgttttaggaagcattcacccattctgtagggatacaatcctcatttttaccaaagaggaaacaggctcatagagtttaaaggatttgcctaaagtttttctaaagtttctccaatagttagaaaagaagccaggtcttttcattggaattatcaatcctttcctcatgtaactggctattggtaggaggaaaattatcaacaggagtgatgataccttcagaaatctcttgagtcaacaacttattagaattaataattttgaagtatttagacagcaggaagagttgggccagcaaagattattaatttggttggcaaattgtgtttatttgggatgtttgacactgcttttttttttttttttttttgagacagagtctctcgctctatcacccaggctggaatccatcgatacactctctgctcactgcaacctccacctcccaggttcaagcgattctcatgcctcagcctcccaactagctggggttacaggtgtgcgccaccacgcctggctaatttttgtatttttagtagagatggggtcttgccatgttggccaggctggtctctaactcatggcctcaagtgatccaccaccttgacctcccaaagcgctgggattataggcatgagctactgtgtctggccagacactgctatttataaggatcataaaatgtaaatttaaggcactcaaagatgcttctgcatttggatttatctccttcaaaaataaagatttgattcttttgtgctattcctgaaataaaaatacaaataaaataaaaacttaaaaaagatttgaaaaagaaatgtatttaaaaatctaaaagtgtttacaagtagattttcttttttttttttctaaatttctagacagggcctcactctgttgtccagtctggagtgcatggcatgatgacagctcactgcagcctccatttcctgggctcaagcaatcctctggcctcagcctcctcagtagctaggactacaggcatacggcactgcatctggctgattttttttgtttttttttgtttttggagagacgtggtctcatgtttcccaggctggtctctaatttcctgactcaagtgatccccccacctcagcctcccaaagtgttgggattataggcatgagccaccatgcttagcctacttgattattattatttagggagacgaggcctttacagtcacaaataaaatcagaagtatcacagagattctttgaagtctgaatttacatccactgttattatgtatgaactttacctgacattttatcatgccttgagatattaactagtattgtgaagccaatatttaaaactacttttcattttatctttgtgtcatcttattaaaagtgctgtttttggccagacatggtggctcacgcctgtaatccgaggactttgagaagtcgaggcgggaggtttgcttgagcccaggagttcgagaccagcctgggcaacatagtgagactttggctttactaacaaaaataaaataattagccactggtggtggtgcgtgcccgtagcaccagctacttgggaggctgatgcttgaggttggaggatacaaggctgcagtgagctgtgatcgtaccactgcactccagcctgggcgacagtgagacccggtctcaaaaaaaaaaaaagaagaagaaaaagctatttttgagtattttataatataatagtagagtrgtacatgtatagaatttataagtggacatatcctggagtggagagtcaaaaagtcaatggattgcatgatgaaaacttgaaacaacttagagaaagatgctggaaaactaaggcaaagaaagattggtcatttgaggattggtttagattctagtaggtaccagtgattatatgatttcctttgcatatgttatgtgacatgatgttaacaataatcttctgaaataaatattgccattttatagtcagcaagactgaggctcagaraagtgtaataacctgcccatgcgcacaatcactgtattgcagattctgtatttcagcctcagtcttctacctaaactctttctacatactgtttctattgaattaactgggcatttgaaaatgccattagctgagataaagaatacaagtaactgatattctccagattactagttgaattttttataaggatgtatttgtactaaccctacttgagacatcttatacatatatgatgtgtgctggttgtatctgtggtccataacttattcatcatgttgaaagttaatattgattcttctaagtttgtgttttataacagaatattcggttatgacaaattatttttcctttgggaaaatatcatattttaaattaagataacgcacaaaaaaccataataactatttaagcaattaaaactggtataaatacaaaattttctgatttttctttttcacccttttcagatgagagttttcatggtcctgtatgattcatgatatcaccaagctctagtaacagaagtgttgattgaaatgatttcttcagtcttaggagctcacatgttatagaaaaataccacaatgcttaagaggcttttacctgaagagattagtagtaacatttccatttattcatctttttttctacttcttttgacatgtttttgccaggtagtttatttaatgtgaatttagcagaagtggaatttgaatccacgtatttgcacagagcactgaaagctcccttaaagcaaacagaagaaggcttccagggagaatttcaagaatgttgtacattttaaaaatataagtctctgctgtgctctgttcccacagtttatgccctttgccttgtgactgttatcctttcttttcatctttgcatcagtttgtttgtttttgttttttagatggagtcttgctctgtcgccgaggctggagtgcagtgccgcgatctcagcttactgctacctctgcctcctgggttcaagcaattctcctgcctcagcctcccgagtagctgggattacgggtgcccgccaccacgccaggctaatttttatgtttttagtagagaygggctttcaccatcttggccatgctggtcttgaacttctgacctcgtgatccacccgcctcagcctcccaaagtgccaggattacaggcatgagccaccgcgcctggcttttgtaacagttttaaccatgaccttttaagttatggatttagtttggtttctgcataatatcaggtggtttatagcaagtaaacactgtatatctgtaattggaaagttggtgggaagattacttttccattcttgatgtggcagccttaagtgccatcacagcttgttctgtggtttgccttttttttgcagtgacctcagctcactgcaacctccacctccctggttcaagcaattccccttcttcagcctcccaagtagctgggatttctggtgcatgctaccaggcctggctaatttttttttgtatttttagtatagacagggtttcatcatgttggccagactggcctcaaactcctgacctcaggcaatctgcccacctcagcctcccaaagtgctgggattataggtgtgagccactgcgcccagccgactttcaaattttttaaccacagcccagtgtaacactgtgtgtatgtgtgtgagtgtgcttgtatgtgtgtttgaaataaaatttttcatgtgcttatacattctgatttttttttatcagaaccactaatgagatgagaccatagtttgtaaaacctcatgccttagagaaaaagataagaagacattttctttttaggtttatttttctgtcttaactgaagaccttccaggctggcaatatccaagggccagattcaaagtgaraaggttatatacctcttgaaatatgtaaggttggatgattagaccttgatgcttaaaatagtgctttcagggcagtgaaattttcatcagctcaccccacatttacttgtgccattgccgtaatataaaagcagtgagaacaacaagaaaatgcagtgtaagtactgtacatcatggcaaatattcttgctaaaacttctgctcaccctgtatttcttttgtggggggattttaagctaatttcttgcaatttttagatcagtgggcttgtgttaactcacatcacttagagaatacacttgatacaactttagaaattcaagtgggagctcttgaatgaaaactgctgcctcagatgctgactgaactgggcaaccagtgttgaacaggtgccttcttgtttataacttggtgtgtatgatctcacttgcctcctcataggtagctgtgagacaagatggaattttcttctttattcaaaacaataaccattaccgaaaaacaagcaaacaaaatccaagagctgagatagcttgttctaagtcacatgcgactagtagaaaagagtaaaacttcaacccagatgtggatttcatattgaagatcttaaaacaaaaaccccttcactatgtaattaagaatgtcaagagtcacctttgttgtggattaaaataccaacttttggggcaacagattaggttacagtataatgcaataaagtatcattcagttttcattgtttaaaggtaaataacgtattcttcttgactttgagcttcagatatctaaaatgccttcatttggagaaacattgatacagtccccacaaatatatattttttaactctgtgcaatgaacatggaagcctgggtaaatgtccctgttttatgatgtgtcttcactgtttttgttcttggaagcctgtgaaatagggggagcaggtggtgccattattggcaaacctgaggttgccccaagaaacttaggctccaagtttcttttaacttttgtgtgagaattgaaatgagaactcaggctttctgaccactgcccacttctttgaagaagcattagtccatgtgggcagaaaatgaaatgttgtggttaaagacaagagataaaaaatggcagaagragatttatttgctatttatttgctacttggatttagaatgtagccttgtgaagactttgtcagtgttgtataaagtgatcccatgaagaaagaattcagtaaaattctaaatttagaagacactgatttcacgtagccactaagtagacaactcagtaggtagaaatattctttaaaattctgatttcctttaggccccaagtttcttttaatgtttgctaagcacttatttgcatgtgtcccagtgaaacgttatgtatgtacatactggattagtcatgtttttgtttttttgtttgtttgtttgagacagaatctcactctgtcgccaaggctagtgtgcactggtgcaatctcagctcgctgcaacctccctcttcctgggtcaagcagttctcctgcctcagcctcccaagtagctgggactacaggcgcgcaccacttcgcccggctaattttttctgttttagtagagacagggtttcaccgtgttgcccaggctggtctcgaactcctgagctccagcaatccgcccacctcggtctcccaaagtgctaggattacagacgtgagccattgcgcccggcctagtcatgttttataattgtttttggccccaaccacctgaagtttgattccacaagggattaaagaaaaaggacaaatgcacatagggtatttatagtatatgctcattgaaaggctgattgaataataatagaagaataagaatggataaaatttattgagagcttctatgtactaggtagtattcaaggtgttttatgcattttatctcagaaaatcttgtctgaagatagatgctattaattactccaatttttatagatgaagaaaccaaagcagaaagaatacaagttaatattaagggtcatagtttcataaatgatagagcaagtgtaatgtgacttacatcctgtgcttctaagaactatgttatgctggtcccttataatagacattaaactaagagttactagaaaatgggtcctaatcataattttatcattaaagttcgagcttgtacaagtcacttaatctctttttttgtttcgtcatcctaaactgtgctgttctacctacaactccagtttgtgattaaattgtgatgtaatagggattaaagccagagaagagtagtggctataggctaggatacattatggaaattagaggaacaggaggagtaaaaacaatagaaagtgttaaaaaatgcagttgacttttgaacagctttggggttggggcagtgacccctgttgagctgaaaattcacatataacttttgactaccccaaaatttaatttactaatagcctactattgaccagaagccttactgataacataaacagtcgattaatacatattttgtatgttttatatatatatataatatactgttttcttccttgtcttaagaaattgccatagcccccccagccctcacctttaacagccaccaccctcatcagtcagccgccattaacatcaaagaaagaggctgggtgcggtggctcacacctgtaatcccagcactttgggaggctgaggcgggcagatcacgaggtcaagagatggagaccatcccggccaacatggtaaaaccccgtctctactgaaaatacaaaaattagctgggcgtggtggcgcacacctgtagtcccagctactcgggaggctgaggcaggagaatcgcttgaacccaggaggcagaggttgcagtgagctgagatcgcgccactgcgctccagcctggcgacagagcaagacaacgtcttaaaaaaaaaaaaaatcaaagaaagaccctccattagcagaaagagtattacttactgaagacttagatgatcgttgtattttttagcaacaaagtgtgtgtgtgtgtatttgtgcatttgtttgttttttgagacaggatcttgctctgtaacccaaactgtaatgcagtggtgcagtcactggtcactgcaacgttagcttcctggtctcaagtgatccttctgcctcagcctctcaagcagctgggaccacagtcatacgccaccatgcgtggctactttttaaatttttgtagtgatggtgtcttgctatgttgctcaggctggtgttgaactcctggcctcaagcaatcctcccacctcggcctcccaaagtgttgggattataggcgtgagctactgtacccagcctaaagtatattttaattaaggatgtcgattgttttttaaaatataatggtattgcacatttgccaaactacagtgtattgtaaacataactttaacttttatatgtactaggaaatgaaaaaagtttgcgactagctttgagatattcactttgttttggtggtctggaactgaacctgcagtatctctgagtgtgcctgtacatatacatataaaaaattgtatcataaggaattaactcatgagattatggaggctgacaagtccaaatctgcagtggggttggcaggctcaagtcccaggacagccaatgatgcaaaacaagtccaaaggccatttgctggggaatttgctcttgcttgggaggctggtctctgttctgttcaggcctttaactgattggatgaggaccactcaccttatggagggcagtctgctttgctcaaagctcactgatttaatgttatccaaaataccttccaacttgacatataaaattagcaatcatggccgggcgcggtggctcacagctgaaattctagcactttgggaggctgaggtgggtggattgcttgaggccaggagttcgaaaccagcctggccaatatggcgtaaccctgtctctactaaagatacaaaaatcagccaggcgtggtggcgcatgcttgtaatcccagatactcgggaggctgaaacaggaaaatcacttgaagatgggartgggaggttgcagtgagccaagatggcgtcactgcactccagcctgggcaacacagcgagagtctgtctcaaaaaaaaaaaaaaaaaaaaaaaaattagcaattacacctcctacggaatgtggtacaggcaaggcctttttagagggcatcrgccttcaccaccctactcccagagcttctctccaagcccagcatttttagctacatttttattgcacatatattttattaggtagaaatatattttattaagtaaaaattctaaaacctatttgaaccaaataaaaataggcaagaaagcatcctattgtgaaacagttacaaatgcaaagaatttaggagagtggtgagttaagaggatgtgggtagagtttattataattgtgtggattgtcacctgtcatgaggattacagtttggtaaaagaaaaataaacccttttttcattttgagcctggaatgtatgttactatacayggtgcaataagggccttattagatctacaggaaaattctgtctccattctaagggagagtggcttgtgggaccttaggaaccctggctctactacccaaccattggacaagtcttacctcttttggatgctgctaactcttcagaagaattccttgtggtggtatataacttgttggttgaagaataaataaataaaacgtaattaaagtctatatagcagctactgtttaaccatattgtctcatataaaccttgaaaggagctaataaagtggagggcatagttatattactgctcttacagaaacagcaaccacaattttaagtcttctagtcagtgtaggacagtgttttatacataggtgcttaatataaatatttgatttaaaaccaatcttgtatttttttaattgttttctttcttcccttccactggtcttctttaattttaacttttggccgggcttggtggctcacgcctgtaatcccagcactttgggaggccaaggcggnnnnnnnnnnnnnnnnnnnnnnnnnnnnnnnnnnnnnnnnnnnnnnnnnnnnnnnnnnnnnnnnnnnnnnnnnnnnnnnnnnnnnnnnnnnnnnnnnnnnnnnnnnnnnnnnnnnnnnnnnnnnnnnnnnnnnnnnnnnnnnnnnnnnnnnnnnnnnnnnnnnnnnnnnnnnnnnnnnnnnnnnnnnnnnnnnnnnnnnnnnnnnnnnnnnnnnnnnnnnnnnnnnnnnnnnnnnnnnnnnnnnnnnnnnnnnnnnnnnnnnnnnnnnnnnnnnnnnnnnnnnnnnnnnnnctcccacctcagccttccagtagctgggaactacaggtgtgcctcactatgcccagccactgcttaactctgattttatcctcaatcattgtctactgtargatgaatgctgtattttttttttttttaattctagagaggaaacctttctgtagtgtaacttgcaaaagagttggtgtttttctttctcagtgatctcttacagcaaatgttcattaattaaaaatagctgaccgacacaggaaacagctcatgtagcagcttatgatgttgttctaaaaacagacttgagctctcgagtgctagagaagcatgaatattgaaaacattgcaaacaaattcaggtaaaagtatggtgtgttctaagaaggatctgtgtgcctttacgttaatattttttctgattataaaagtcgtgtgcttactgttaaaaagatattataggcctgggygcagtggctcatgcctgtaaacccagcactttgggaggctgaggcaggcagatggcttgagtccaggaggttgaggctgcagtgagctatgatcgcccaactgtactgcagcctgagcaacagaatgagaccctgtcaaaggaagaaaagatattgtaaccatgtattttgtagaaagtgaagttctcacccaagttatagcatttatttattctggtggtttctttttttgttgtttttttgagacggagtctcactctgtcacccaggctggagtgcaatggcacgatctcagctcactgcaacctccgcctccgagttcaagcgattttcctgcctcagcctcccgagtagctgggattacaggcgcctgccaccacacctagcaaatttttgtatttttagtagagacggggtttcaccatgttggccaggctggtctcgaactcctgacctcagatgatccacccttatcagcctcccaaaatgctggggttataggcatgagccattgcgcccggcctattctggtggtttctatcggatttttaaaatacataygcaaacagtatatacttattgtttaaatggaattatactrtttattcaacttgtttttttatttatatatactagaaattttccacagaaatcttttaaaattccctaatttgttatcttttatttatttattgagacagagtcttgctctgtcgcccaggctggagtgcagtggcgcaatctcggctcactgcaacctctgcctcctgggttcaaggaattctcctgcctcagcctcccaagtagctgggactacaggtgtgtgccaccatgcctggataatttttttgtatttttagtagaaacrggatttcaccatgttagccaggctggtctcaaactcctgacctcaggcagtctacccgcctcagcctcccaaagtgctgggattacaggcgtgagccaccacgtccggccatttgctatctttttaaagacaacatagtatttcactctatacctagactacagtttgtttaaaccaattttctttttcttctttgttttttttttgagacggagttttgctcttgttgcccaggctggagtgcaatggcataatctcgactcatcgcaacctctgcctcccaggttcaagcaattctcctgctttagcctcccgagtagctgggattacaggcatgcggcaccatgcctggctaattttgtatttttagtagatatggggtttctccatgttggtcaggctggtcttgaactcccaacttcagatgatcttcccgcctcggcctcccaaagtgctgggattacaagcatgagccactgtgcctggcctaaccaattttctattaatagacttgtgggttgataatattttatttaaaaacttttttttycctgaaagtcaccatttttagagcagatacacttgtcattgaacaaatatgtagtaatttaatagtataatatattcacattttactatgtgtctggcagttttctaagaattatcctgtgcgaattagaataattctacaaccttatgagggagttgctatacctcttccagagtttcagaaagcctccaagttccatatatgccatctcgaccctccataagatggaccaaaagacagggtgattggatcagacatgtgaggactcctaaatccaaaggagcaggcataaggcagcagctgcctcagtacaaaaaagcagagcttacaagtttttgctggaagtattgatgccgaagtattctctcgttgccatgacaggtttcagaagaactgctttcttaatccttctgactgcttcgaagttttcttttttctttttcttttttttttttttttttgagttgcagtcttgctctgttgcctaggctggagtgcagtggcatgatcttggctcattgctcctgggttcaagcgattcttctgcttcagcctccctastagctgggagcacaggtgcacaccactacacctgggtaatttttgtatttttggtagagagagggtttttccatgttggccatgctggtctcgaactcctgacctcaggtaatccggcctcctcagcctcccaaagtgctgggattacaggcgtgagccgctgcgcccggcctgctttgaaggtttccttgtctcttcccaccaattgtttggtgcctgtgtagtccttgctgacttccacattctcttgtgaatttacttgatacacagggctttgccttagattgggctgtattctggtctgccatcaagagatgtcagctaatgctgacatgtcccatccttgggtgttctttcttgatggcctccatagctgtttgttgttttctgttgaaaatggaaacttgaaatatttgttattaatggcttagaccctgtgatggttaattttagatgtttctctttctctgtctttccattcttctcctgtccttggacatcggaaccccaggttctttggcctttggactaattaggggcctgccaaccttccccccaacccccacaccaagctctcaggtctttggcctcagactgagaattacatcattgccttccttggttctgaggcttttgggcttcaactgagccaggcactggcatccctgggcctccagcttgcagatggccagttatgggacttctgggcctccataatcacatgagccaatttccctagtgaattccctctcatccatccrtatctctctctatctgatctatatcctatttgttatgtgtctctggagaaccctgactaatatgtactgtagaaaagcctcctgagacttagacgctatgtttcctttgtttaaatgttgttgaattgatcataggtataatgcattagatttttcagaagaaagaaaaggtttattccacattayatctcttcagaagcctacccaaaggggatatctgttttggctatttattgcagtgtaataaactactctaaagcttagtagcttcaattagtgatttattatgtctcatgattcagtgggctgaccaagctgttcttctggttcatgtggtgttggctaggtgctggaatggctgtgttcctctgagacttggatgggtgctcagctgggacccggtggctgcttgggtcacttgtggagtggtatctggattccaacagggaggcagtggatgctacccacacagttaaggactaggcccagaaccagcacagcatcatttctgccatgtgttaatggtcaaggcagtaataggcccagcctacatcagtgtgggaagtgactaaacaaaaatgtaaacacctagacatgtggttcattggggatgatcaccaaaataaccactgaccagagtgtgctctctggcccttcacacatgcacgatagagcagcccatacaagtctcactcactccattactacatcagcttgacaggtctaggatctcatcctctacatcaggtccaggtgaggctccctgtgagaggtgacagtgtgctggcagtcctcagagccctcgcttgctctcggcacctcccctgcctgggctcccactttggtggcatttgaggagcccttcagccccccactgcactgtgggagcccctttctgggctggccaaggccggagcccactccctcagcttgcagggaggtgtggagggagaggcacgagcgggaaccagggctgcgtgtggcgcttgcgggccagctggagttccgggtgggcgtgggcttggtgggccccgcactcggagcagccagccagccctgctggccccgggcaatgggggacttagcacccgggccagtggctgcggagggtgtactgggtcccccagcagtgctggcccaccggtgctgcgctcaatttctcgctgggccttggctgcctttccacggggcagggctcgggacctgcagcccgccatgcctgagcctcccacccactccatgggctcctgtgtggcccaagcctcccggacgagcaccaccccctgctccacggcgcccagtcccatcgatcacccaagggctgaggaatgcgagtgcggggcgcaggactggcaggcagctccacctgcagccccggtgcgggatccactaggtgaagccagctgggctcctgagtctggtggggacgtggagagtctttatatctagctcagggattgtaaatacaccaatcagcatcccgtgtttagctcaaggtttgtgagtgcaccaatcgacactgtatctagctgctctggtgaggacgtggagaacctttatgtgtagctcaaggattgtaaatataccaatcggcactctgtatctagctcaaggtttgtaaacacaccaatcagcaccctgtgtttagctcaaggtttgtaaatgcaccaatcgacactctgtatctagctgctctggtggggccttggagaacctgtgtgtccaaactctgtatctaactaatctgatggggacgtggagaacctttgtatctagctcagggattgtaaacgcaccaatcagcaccctgacaaaacaggccactgggctctaccaatcagcaggatgtgggtggggccagataagagaataaaagcaggctgcccgagccagcattggcaacctgctcgtgtccccttccacactgtggaagctttgttcttttgctctttgcaataactcttgctactgctcactctttgggtccatgctgcttttatgagctgtaacactcaccgcgaagatctgcagcttcactcctgagtccagcgagcccaggagcccactggggggaaggaacaactccagacgcgccgccttaaaagctgtaacactcaccgcaaaggtctgcagcttcactcctgagccagcgagaccacgaacccaccagaaggaagaaactccgaacacatctgaacatcagaagggacagactccagacgcgccaccttaagagctgtaacactcaccgcgagggtctgcggcttcattcttgaagtcagaccaagaacccaccaattccggacacacctgggtgcagctcatctcaaactgaagacctatgaattaaaagcacacgttattttccgttcttccccactttccaccccaacatataatggtaaggcagggacaggaaaattacatcagatattcctcttcaaaaagatattaggagctgtggaccgggcgcggtggctcatgcctgtaatcccagcactttgggaggctgaggcgggcagataacgaggtcaggagatcgagaccatcatggctaacatggtgaaaccctgtctctactaaaaaatacaaaaacttagccgagcatggtggtgggcgcctgtagtcccagctactcgggaggctgaggcaggagaacggcgtgaacccaggaggcagaggttgcagtgagctgagagcgcgccactgcactccagcctgggtgacagtgcgagactctgtctcaaaaaaaaaaaacaaaaagtattcggggctgtggagaaatcagagccctgacacactgctggtagaaatgtaaaatggtacagttgctttggaaaacagtctgggtagttctttgaaggttaaacatagagttgccatatgacccagcaattctgtacctagacatatactcaaaagcaatgaaaccatagttccacagaaaaccttgtacatgaatgtttatagttgcaatataatagccaaaaggtggaaacaactcaaatgtccagctgatgaataggtaaataaaaagtgatatgcctgtatactggcattcttttggctgtacgaaagaataaagtactcctacctacaacatggatgaatcttaaaaatgtactaagtgaaagaatccagtcacaaaagaccatgtgttgtatgcttccatgtatatgaaatgtcccaaagagccaaatctatagacagaaagattagcgttgcttaggctgggagggctggaatgggggaaggtgatagctaaaaggtatacggttctttttgggttgggagaggtggctcatgcctgtaatcccagcaccttgggaggccaaggtgggttgattgcttgaatccaggagtttgagaatagcctggacaacatggcgaaatttctacaaaaaatacaaaaatttgccaggcatggtgtcgtgtgcctgtagtcccagctactcggaggctgaggcaagaggatcgcttgagcccaggaggttgaggctgcggtgagccgtgattgcacccctgtactccagcctgggtgacaaagccagaccctatctccaaattaaaaacaaatttatttttggtgtgatgaaaaggtctaaaattgatggcgggtatatgtatctgtgaatatagtaaaaaccttgccattgtaaacttatttaaacagaaaaaagcagcagatgtgactgggaggcacatgaccttcactggtgcatagcatttctgacatttagctcgatctatatccttgttgaggaactagttcactacctgggtgcctctctttggccctcatctccatcccctaggctcttggctgtcttctgattcttttccacaagaaatggcctgtgttttttggcgtcttcctgtccgagtagggtgctagtatttttcatttttaactggctctattagtccaagctgatggtgtttccactggtatatttctctgaaatgccttttgggttttaccatagatgtcttaggggttcacaacattaggtaaaaaatactcccacaaatcgttttaagatagggctttctttaccttggatgcctttgtatcagactgtcatgtgaaaataaccttttattgtcaaaagctctactgtctggtttagttggtactcaaagcacccacttaagattctttaaagccttttggtctagttatgtgattccaaaagcacgggtgtctgtaccagcagcatttgtatcacctgggaacttacagttgaagtctccatcccagactttctagatgaaaaactgtgatgatccagcccagaaatctaggttttaataaaatctccgggtgagtctgatgcatacgaagttttagaaccactggtctaagagaaagtccatgagcaaccacctaacatcttcatgaggtctcaaaaaaggatcttaccaccacatcctagaggctctactttactgctagcactggatttgatctttgccctaaggccatttcttattttgagtggttttaagcttagttactgaaaagaggaattgttttattttttaacccatgaagtccaacttctttatatttcctctgaattctgcttaaaaaggaaccaaacagttcctttttaaattcatgtcactactcctatattttattgtaggcagctaaaaacaagccagttggcacttttgacattcttcttggaattctccttagttgggtgcatgagttcattaggtaccctttctgttctccatgttactgtatgaaacgggtctgctgctttttcttaggtctccatttcttcagccaccagtaacatttctatactgtttttcaaatctttaccagcagtcttctagctgttgtctaccacctggacccaaaccgtacatattttgagtttttgttatagcagagcctcctttctgataccaaattttgttttggttatctattgttgcataattaataatttcaaaatttaatggcttaaaaacaagtattttctcacgcatggtcttgcaatttggccagagtttggtaggaatggcacatctctgatctgtgtgctgacagctcgattagatttatttccaagataccttaattatatgactgtcgagttggtcctaccacctgaggttttagttggaattgtcaactgggaccttaattctcctccacgcagccctttctgatgcatgttctgctttgaccttctcacaatgtggcagctagattccaaaaagcaggaagcagaagttgccatgcctctagctaggtgcagggctatgtgcctgtaataccagctactcaggaagctgaagtggatggatcacttgaggccagcctgggtagcagtgagaacctgtttctaattaaaaaaacataaaagaaggtgcctggcctcttaaagattaagctcgcatttggcatacagtggaatttctggtcttttctgctggacaaagcaatcatatacctagctcagattcaaggaggtggagaaatagaccccatctcttagtgggggtagtggcagaagttgtggctgtcattaatccactgtaatctgtgagctgtttttctttaacagtactgaaaagacactcttggcttaaggttatgagttggtgaaaagtaattgtttactacttgaaaaatgaagatctggccaggtgcgtggctcatgcctgtaattccagcactttgggaggccaaggcaggcggatcacctgaggtaaggagttcaggaccatcctggccaacatggcgaaaccctttctctactaaaagtacaaaaattagccgggcgtggtggtgggtgcctgtaatcccagctactcaggaggctgagacaggagaatcgcttgaacccagaaggcagaagttgtagtgagctgagattatgcactgcactccagcctaggtgactagagtgagactccgtctcaaaaaaaaaaaaaccttgaagatctggaaggaggtagcaagaaaacctttccatataaagagcctctcttgatatcagtttgttgaagttttattttaatatggaacacttcacgaatttgcatgtcatccttgtattctctctgtcattccgattttagtatatgtgctgccaaagtaagcaccattggaagaaattttaaatggtgtatttcacagatggacagaagtcattttaagttccttgccaacagagtaacactctccagcaccattggttgtgtcaaagtttgtgtgtracaggaaagtgtgaatgtgtttatacatcttgatcttaccagtgaacggtgtattttttttaaaataaagcttgtcttatacactactaagtgtagagaaagagtccccttccacacactcccctcctcaaaatagaaccagatgctctttaagagttgtgaacaatgaaaggcataatctggatgcattgtagaaatgattgtggtaaaccaaagaaggaataatgggatgacagaagcccagggctttctatcacttggaacttttgtggtgcagctgtttgtagattggtaggagacgacaaaacagatggcagcagaggttgcctctgcctttgctcattcactcgagtcatctattaggtttgctcagacaggatagtaaatggcttcctgaatttgtgaagcacttaggctagtaaatttctccatatctaatttggagttctgtttagaaaaaaaatatcaaattaatgccctgtgacaacagtgattcaacagagtttatatccatctttcataggatctgattagtattaagtctttgacctttattttcttttttatcgtattgttgtacttttgatttaatgcttttgtttctggttatacattttcttgatagcatcagtaagttgttggtaagtattgaaataacttaaatatttttcttcaatgtgattgtgttttttaatgagacagagtctcactctgttgcccaggctgaagtggagtgccacgatctcggctttcactgcagcctccgtctcccagattaaagcaattgtcacgcctcatcgtcctgaatagctgaaactacagttgtatgccaccacacctggctaatgttttgtattttttgtacagatggggtttcaccatgttggccaagctggtcttgaactcctgacctcaggtgatctgcccaccttggcctcgcaaagtgctgggcttacagatgtgagccgttgtgcctggcttcttgttaagtattgaaataacttgaatatttttcttcaatatgattgtgaaaatatttgggatagcacaagcttcccttagttgcttgtagttttactttcccacacctgagtagtttgcaagtgtgattgactttgtgcttcctcctttttctctctttgttcttccatttatgttttaatcttccgtcctcctcataccttaccaagtctggttgagtaacatatttaggaatgatcttatgggtagtgtggttgaggcatgatcacaattatgatccgtggcatatgaatctgcatgaagaatccttccagctccttctggatattctccatcccagtgtcaaacttccatggcacgataccattaccaaccatttcagcaacgatgcccacactgttggtttctagagattatttacttctgtatctgcccaacttataactccgtttgctttgggatatgctagatacttattaatctgtcaagtaattattgtatgtgaactagtaaaatgttaactaggagatacagaggtgaacaggaaatgttcactgtaattggctccttggtcttcagtcttcacaatttttcacagtcagatttgaaagctgaatgtagttttctgaaggcttggagtacatacttgtgctatttgaggaggtctctgagtttttttggtgctcttgcctcacaactatacttaatcatatttaataggaccttgtttcatttcctattaaatatga

SEQ ID NO: 6816 - DNA, 44457 bp, Homo sapiens
tgcttatggtctggggtggacagagcagactttctggaggagatggcatttgacctatccaaggaggaaaagtcttgggtaggcattcaaagggcacttcttgaaggggaaagagcaccgtgaatgtcagacagcaaaagagaaggctgaccctgggggcagytggctttcaacttgacattcccctcaccctagtatgggctggaatagttagtgaagaccatcttatgcaccagtggtttggggttttggtgttgggtgtgtgagcactgggggaggggcgtggagaggtactccctagttgcttccagctgactgactgctgcggccttatctctagtttgcagggccttgcgggagggccctggaaagtgccttctggcagtgaccccttccccttccccttcttgtttttggtcggatttgttgcctcttgttaaagagacaggctgctggaggcaatttggagttcagggctgaaaggccagctctgagctgacttgaaatttgtacctctgaggaccgctgatggggtataactgtgtgggagacctctgcccttagtgccctaggatggcacttgtccctttggagatagacatataagaaggagttgtgcaatttggtggctttgagtaagaaagctgaattcttcccctggccgcctctcagctgacacggtctcttggatcttgggggtctctcatcccttcctccatgtagggcaggagtcctcaaatggtggccctgacaagtagttattctacctcaactcacttgtcacatccttattatactgagccaagacctgcctctttgactccttaggtagcccaactctgccatctgtgccctggaccccaagcctaccctttctgttcctgaagagcctctcacatgggagaaggatgtcctggagtgtactattagcctataattggtgacaggccttaccgctggctccagtgatcctggcttacgtctgttcttctctcctcagggtcctgctgagctcaggagctgcacggaatggtggcagtcaccttgccagtgcagcaggcatggatcagactgcaagctaggggcacgaggcatcagttgggaagaggggacgcacagctaggcttgaggcctcttcatcggggtaagtaccagggagaagagggggaagtgtgtccagtaagaagcctgagctaaacctgtcaccctctcaggagttctgagagtggtctctatattccattagtccatccagggatttgtacacattcatccttgggaacccatcaaagtcacccctttaggcaaggagagggtctgaaactcagctggaaggaagaagactcattgattcccctgaccaccttttcttctcttctcttacacagatgtccccaggccccccagcccaggcccagcataaaggccgtgttggggggcccccctgaccyaaggggggcttcatgcgccacgtgcaggcggagccrtctccatcctcagagccggaggctggcccttcacagcctccagtcaggcagggggccctccagggtggcctgctcatgggctacagcccagcagggggggcgacatcccccggggtctaccaggtatccatcttttcccctccggctggtacctctgagcctcatagggccctgaaacgacaagccccatccactgagggtccccgggagctgaagagaggccctgggctgggggccagagagggactaccccctgaagaaccatctactgtggggctcttaggcccagagggaccggggctgggactaggtgtggccagccagcatttctcccaccgtggcctctgtgttgtggaacagagaagtagtgtcacctcatcttggacttcrggggcctggagtcccccctgccccccatcaaatgcttcctgcaatactttgcacaccagagactgggcctccccagatccagggggacaggkttccctgggggagtccccagggccarcccctccaggccagctgcacacacttgacactgatttgcacagtcttgcacaaatagggggtaagagcccagtggctggggtgggcaatgggggtagcctctggcctagggagtcccctggcactgccaatgggcacagtcccgagcacacaccccctggccctggacccccaggcccctgccccaccaagcgaaggctgcttcctgctggagaagccccagatgtcagctctgaggaagaggggccagcccctcggaggcgccggggatccctgggccaccctactgctgccaacagttctgatgccaaagccacacccttctggagccacctgctgcctgggcccaaagagcctgttttggtaagccaataaaggacctcatttactctttttttacttttttttttttttttttttttttgagatgggatctcactccatcactgctggagtgcagtggcacaatctcagctgactgcaacctcctcctcccaggctcaagggatcctccaacctcagcctcccaagtatctgggaccacaggcacatgacattgcacccagctaatttttggtatttttggtagaaatggggtttcgccatgttgcccmagctggtctcgaactcctgagctcaaatcatcgacccaccttggccttctaaagtgttgtgattacaggcgctcaagccactgcgcctgtccttcatgtactcttaagtggatatttgtgtgggtaaaggtggaggcctggggggcagggtgttcctttgagagtttgtgatgagcttctgccccaaaacatacatggccttcaccctgtgtcttttcccaatcatttctctccgtaggacccaacagactgcggtcccatggggcggaggctgaaaggagcccgtcgcctgaagctgtaagtgaccagctttttcctctaccctgtccctgagaatgggggcagaagtctgtactctttccagcatccgagtaggggaccccagggcagaagccctacatagtggcagagggtggagtccaagggcataagcaggaatcccagaatacctcaagccaaccccctgtgtttcccttcctctaccaggagcccccttcgaagcctccggaaggggccaggcctgctgagcccccccagtgcctcccctgttcctacccctgctgtcagccgtaccctgctgggcaactttgaggtagctcccgttggggtttgtgattgccggggtcctgggagaggtgggatggtggaatgtggcttggatggataaggaaaagaattggcatctctctcttcatgtgttttccctaccctaatcccaggaatcattgctgcgaggacgttttgcaccatctggccacattgagggcttcacagcagaaattggagctagtgggtcatactgcccccagcacgtcacrctgcctgtcactgtcacattctttgatgtttctgagcaaaatgccccggctcccttcctggtatgccttgactccaaccccaaagtcagctcatcaagaggatgaggatttgggggcggggccagggggcaagaggtatttcttacttattcctcacctagaagtgagtcagggccaggtgaggagaactctactgtagggcaggggcaggttcagggtgagagcttgtggagagggacatgtgtttagggcccagggttttcctagtccccaccttgactgatggctccctggccttccagggcatcgtggatctgaaccccttggggaggaagggttacagcgtgcccaaggtgggcaccgtccaagtggtgagtttgccctgagggagtgggagtggggagagaggaaagcagccctcaggccctaccaaccttgactgtcctgtccctagaccttatttaaccccaaccagactgtggtaaagatgttccttgtgacctttgacttctcggacatgcctgctgcccacatgaccttcctgcgccatcgcctctttttggtgcctgtgggtgaggagggaaatgctaaccccacccaccgcctcctctgctacttgctgcacctcaggtgaggagagggcccagggatggctggggaggcccaggtatcccctccctgaagaggatctctccttgcttcgatactgtccggattcttgcttagtttatttttaaatttttatgtatgtatgtacatatatatgtatgtattcatttatttttagagatggggtctcgctatgttgcttaggctggtctccaactcctgggctcaagcagtcctcccacctgggtctcccaaagcactggaattacaggcatgagccactgaacccagcctggattcttacgttgatcacattgtcctcctccaggttccggagctcccgctcaggccgcttaagcctgcatggagatatccgcctgcttttttcccgccggagcctggagctggacacagggctcccctacgaactgcaggctgtgacygaggcccctcataatccacgttattcacctttgccctgattgccagcactctgaacccatgcgggctaatgacctgcccatcctgctccatcttagagaacatatatggagagacagcaagagacccttcaggcttgaattaaagccctcaccatgctcacrcccaaatggattatttgggtgtttaaagcttctgattcttactacaccctgccctacttcgggtactccatgtgcctgtcccctcccttgggtttcccaggccagcttaggtagtagggaggaactggagctaccctgagattttctcaagttcccaggcaagttatgccagcgttgcctccctgtcctgggcaggggccacttgttattttatttatttttaatttataatttattcaaattggattgccttggtaacctcccacacctgataattggcatcactcctccccgcttcccactctcagatattgctccaacctcaggagttgaagaggcttatgcggtgggggcaggaggagaactgctttccctcagctgagggaagaggggctattccagagggactgagtcagtagccaaagactcagcttcccctgtccttccccagtcccttcacttcccctaccctctgacctatctctgaaagccaagttatgcgtatgtgtgtgtgcacaagcttgtctttgtgtggtatgtgtgtgtgagtgtgcatgtatgcacacacacaggggttaaccacccctcacctagggctccagactccagttgtccctctcctcctacctgtgtctccttgttttggggtcctgactgaagaaggtgtccagggggcagagtcagggccaagcactggggtgcctcctytcacctggccagactctgacccacctacctcagctggggtgaggggcacccctcaaactcagtcatgtggttccaaactaccccattccccactccagactctgacccagcctcagtcctaactcctggggctgggctgaggggaacaagcatttgctgaaacttgaaaaaacaaagcaaatcaaaaacaggaaaaaattgtacctggtacttttttttagaaaaaaagattaaaaaagaaagaataaattcttgtttggaaacttgaactaagctctacttttgttgttgttgttgttgttggggagagggtgtgaagggggatggagggccttcctggagctgggactcagccctttctaccagagaggcaacaggcctgggcccatgaggtcttaggctagtccctgctgattcctggggcctggtttttctcctttcggaggggttggtgggtaaagttcagccgtagaagctgaactctgaattgtagatcaggattctaatactggttctattaatgactttagcccctcagaacttcagtgccctcatatgtaaaatggaggtgactacggaggtctcttgactaccagagcattagggatgtgggcaaggtgacatgctccagacaaggttgaacgttgaggctgtttgctggactstatttaagaccgggcataacaaaccttgcttgggaagacagggaaggagctgcagtgtctttgaggaaagaggggaggggaaaatctcggcccaatcgccaggcaatattaggcccagtttccatggcaacgggattggggtcagtccccagtgggwgtcctgggcacaacacagcgggactaccagagaatatcactatggcaaccatggcaacgagtcagctccaatccactagtcgctatggtgacagatgggggcgatactacgctctggtgggcaaactgagtctcgggtgaggacgaataattcagtgcgtggtgtctgagtgataatgcccgcgaaaaatagcctccattttggccatcaggccggggatcttcggcgtgaacagctaaacccagaacaaccacagccttcgcccttctctagaaggtctgcgtttcccagggaacaacttgacgcgccgttcgaccaagtaacgctgattgggtgagtgttgaagcgggggagggagctgccggaagtacatccgggggagcggaactgcaagaggaaaggctcgggtaggcttctgggagcgaccgctccgctcgtctcgttggtkccggaggtcgctgcggcggtgggaaatgctggcgcgcgcggcgcggggcactggggcccttttgctgagggtgagagcgaggcaacctttccagagggtcaggacagagattacctgggttctccgctggaaaagagcgaaattccaacttttggagaggactggggtcagaggtcatggtccccatgtgattctccgaggatcctgagggtcgtggtttatggagatgccttcaggaccgaggggcggcgtgtctggccagatgggatctctgctcaccctcttctttccttcagggctctctactggcttctggccgcgctccgcgccgcgcctcctctggattgccccgaaacaccgtggtactgttcgtrccgcagcaggaggcctgggtggtggagcgaatgggccgattccaccggatcctggagcctgtgagaaacctcttctgcccaccctgggccagccagatgaccaatccctcacgacatgcaatgtcgggaggacttcctttgggcctgcccgcactgttagctcccgactctgtaggccagacctgacagggcccaggctgctgaccatcatccccatgttaccaccttttcctatgcatctcacaggccccattcttgggaatctcccctgcccactctcagccctacctctcagtctgcatagagatggctattctgctggctccgattctcatgactctcccctccattcaggggcctagtcttgcattcctgttctcttgggttttcttaccagtgacacctcagccttctgaggacttatttcttggtaggagctgctgcttttctgggcatgttccatgtgttgactccctacatactccaggactagcttaggtcccaacccaatagttcccagccttctgaggacccatgactcctctttccagggtttgaacatcctcatccctgtgttagaccggatccgatatgtgcagagtctcaaggaaattgtyatcaacgtgcctgagcagtcggctgtgactctcggtgaggggttcagggtgacatgggtgctctgaggctattaggatgtggttgctgtagatccagagcttagtagaaagaactggttgggacctagaggcctgactttccccgttttctctcctggttctacagacaatgtaactctgcaaatcgatggagtcctttacctgcgcatcatggacccttacaaggtacctgtcccctactttatccagccttttsasttgccctcttcactaaaatcttgtgcccaagcttcttacactatccgtgtccatctcaggcaagctacggtgtggaggaccctgagtatgccgtcacccagctagctcaaacaaccatgagatcagagctcggcaaactctctctggacaaagtcttccgggtaagcagatctgagccagagttagggtttgaagacacaaacctgacactcttaatcttttctgaaggtcaagatcagtcccaggcccttctcagtgtaggcccttgataggtaggttgaggctgtggggcttacacctctttttccaggaacgggagtccctgaatgccagcattgtggatgcyatcaaccaagctgctgactgctggggtatccgctgcctccgttatgagatcaaggatatccatgtgccaccccgggtgaaagagtctatgcagatgcaggtgggggccaaggaggggtgggaaaagggcctcagggctccagtaccaggaggatccagacttccctcctgttatgatgggtagagttgcatgtctgtatcagtctcccttggcttgttgattgggattgttgtgggcttccaggtggaggcagagcggcggaaacgggccacagttctagagtctgaggggacccgagagtcggccatcaatgtggcagaagggaagaaacaggcccagatcctggcctccgaagcagaaaaggctgaacagataaatcaggcagcaggtcaggagagggtagaggctgagggaggagcaaggcatgggcctttgaagattggtgctggggcaggatctttggggtactttgacttcatgggtcaagcaagctctgtcccttctcttgcaggagaggccagtgcagttctggcgaaggccaaggctaaagctgaagctattcgaatcctggctgcagctctgacacaacatgtgagaggcccctgggtgggaatggggacaggaattgacagtggaaggggttctcttatctacgcttgaggagagttccgcctctgtgggctctgttgagccagattacatggtcctttttattgtgaactgctttcttcattccccatcccccscttcttctccgtatcggtgatctctgatttttatccccctgtgatcacagaatggagatgcagcagcttcactgactgtggccgagcagtatrtcagcgcgttctccaaactggccaaggactccaacactatcctactgccctccaaccctggcgatgtcaccagcatggtggctcaggttagagctctctgaggacccagcayagagcactggtgccagggaccaaactgagaccccaccaccgtcatcaacacttacataccataaaggtcttcagagtgccttggccctagacctcccttcrttctttgtagagatggaatctaagaatgaaacatctccactcagtcctgcaaatatggaagttcttgagatacctttttttggtagatacttgtgctggtattctgagagtcactttactctgatggtttgcaagattcctaaaatcaactccagagcttacaagacaggtttgagagagggagaaaggaaaaccaacttactggcccccatgccatcttttcccgtttagccattggtaggctgggctgcacctctgtcaagtgtcctcatggtattctctctgttcctctcctcaggccatgggtgtatatggagccctcaccaaagccccagtgccagggactccagactcactctccagtgggagcagcagagatgtccagggtacagatgcaagtcttgatgaggaacttgatcgagtcaagatgagttagtggagctgggcttggccagggagtctgggracaaggaagcagattttcctgattctggctytagcttccctgccaagattttggtttttatttttttatttgaactttagtcrtgtaayaaactcaccagtggcaaaccagaaactgtcctctttgattggggaatgaagttgggaaagtcactagcattttccttggatccagtcctgtcagcatgatgcctccatgaataagagtgaacttcttgtaaagtgaaactatcatttttgtcttcaagagaaactgtgggatagggtggaagtgttaaaccatatgttcactgaactgctggctgggaagtgaagtccccttcctgctaagtgtggggctgtgtgtttgaggcaggtgtttgggggttttttcgtgggaaagaagtactttcatgagaaactactaccctgcactggcatacttaaagggttttcagggactgagggtgctcctcattcatttattcaaaaacattgaatgtctaccaagtgccaagctcattactagacactggattacaaaaatacctgaaacccagtggtccctgctttcacagaatacaaggtcaggtagggaaaacagacaggaagcagacagtgatagaaagtgataaatgtggccgggcgtggtggctcaacacctgtaatcccagcactttgggaggctgaggtgtgcagatcatgaggtcaggagattgagaccatcctggccaatatggtgaaaccccgtctactaaaaatacaaaaactagctgggcgtggtagcatgtgcgggtagtcccagttgcttgggaggctgaggcaggagaattgcatgaacctgggaggtggaggctgcagtgagccgtgatcacgccattgcactccagcctggcaacagtgagacactctgttaaaaaaaaaaaaaaaagtgataaatgctgtggtagaggaaagttctggctgagggatcttggtgggaagagcatatcagcttatgagtagcagcgttgctgattgccactgaactcaggctggaaaagttagcaagttttcaccaagtcaggtcctggactagaataaacaaaggctcactgcttgagagaagttggctgaagggtatagtgttaagggggatgtgactacatggcaagggccaagtcacaaggaatgagattcttgttgaaggggttggacattatccctagggtaatagggattttttgtttgtttgtttgagacagcgtctccctctgttgtccaggctggagtgcaatggcatgatctcggctcactgcaacctccgcctcccgggttcaagcaattctcctgcctcagcctccttagtagctgggattacaggcatgcgccaccatacctggctaatttttttgttttttgtagagacagggtttcaccatgttggtcaggctgatctcgaactccagacctcgtgatctgcccgcctgagcctcccaaagtgctgggattacaggcgtgagccactgtgcccggcctatgaagggtttttttcccttcccatgaagaattttaagataaaacatcacattggccaggcacagtgactcatacctgtgatcccagcactttgggaggctgaggtgggaggatcacttgagcccaggagttgaccagcctgggcaacatggtaagaccctatctctacaaaaaagaaaaaaataacagtaatcacattaatgttttagttagagctgtcttgctgcaatgtggagaagggatagtagggagacacaggaggctgggaggacagtgagaaggctgcctcagtgatcctggagaagggatgaggtctgaactgagataaggggctatggggatgaaggtggragaataactcaactttttttaaaaattaacatattcctttattcgtttggtcagtatgtgaacctcaaatatatgctaggtgctgaggatatcataatgaagaaaacagaattccctgacctcaatgagctcacattctactcggagggkataaaccataaatacgtgtagaatttcagatgctgatgagttgtgctatggaagaaattaaggaagtgaggggaaatttttccagggggtgtggtggtgggaggtgctgaactagtaaagtaggggattgcmggaagccttgctgatgttacagttgagcttcaatatgaaggtgatggagatccatttcggcatcgggaactgaagctgacagaggagatggcaaatgcaaaggtcctgaggcagaactgctgtggatggaacagagttagggaagcaaagaagtggcagctagatgaatcagaaggggaagaggcagatagtgtgcagggccatgtagagccaatgcaagaacttttactctgagatgagaaaccagtggacgggttttgtttctttttgagacagagtctygctctgtyrcctaggctggagtgcagtagcacgatctcagctcactgtagcctctgcctcctggcttcaagcaattstccagtctcagcctcctcagtagctgggactacaggtacacatcgccacgcctggctaaattttgtaatttttagtagagttggggtttcagcatgttggccaggctggtctccaattcctgacttcaactgattctccagcctcagcctcccaaagtgctgggcttacaggtgtgagtcatcgtgcytggcattttttttttttttttttgagagggagtcttgctctgttgcccaggctggagtgcagtggtgcaatctcggctcactgcaacctcygcctcctgggttcgagtgattctcctgcctcagcctcccaggtatctgggatcacaggcgcccgccaccactcccgggtaacttttgtattttcagtagagacggcgtttcgtcatattggccgggctggtcttgaactcctgaccttaggtgatccacctgccttgacctcccaaagtgctgggattacaggtgtgaaccactgggcccagcctcccctcctccactccgaaggattatttgcttaattattcagtcgtaagatttagttacaggctttgaaaggaggagtaatgaaatctcagttggactcagctaagcaaaaaagggaaaataagtattatctccattttacagatgaggtaatgcctaatgatgacaatatgtgcggccaagctaggattcaagtcaagtttgactccagcagccgtgctcttagtcgtaaccatgaatggacagtggttccctgaactcttcctccagcttggtcccctgtccccaattttcaattactaaatatcccatcaaactggggccagccccacgctcctggccaaacttccaccgaggtgccggcagatggcgatggagccaccgacgggccactctgtctggcgcacgcatctctgtgctgccaggtcgcaggcgccgccgccgccgcacttccgggtgccattgcaggtgagccagggtctcccgagaacctcaccccccggtattcccctcaccctgaagtaagggagtctccctcttcccctcagctcctaaccaaggtgctcagtaccgcggctagggtgcccagcgggaggctgggtagttaccggaggaggcagagccggtcgcacgcctgggtcccagcggaggcccagtcgactctcgacccgggccccagcctccttgcgtggcgaaggtcgtgcctcaggtctcctggcgaacctggccgcccggaagcggagagtgactcctccccttcgtcccctcggtgcccgccaggcggcgccgtcggctgggcccggattcccctgcggcttcgatccctttccactgggtattgagattggcgaggggagaggcgcagaaacggcgtgtaagagagcctgactaccaattggaataagtttccctcctgactgttcacatgtacaggcagcattagcatttcctgcctgtacatgtgaacgttcctatgctctacccctcgaagatcctgattcagtagatctggggtgggacctcatgaaacggcgtctccctctgttgtccagactctagtgcagtggttcaatctcggctcactgcaacctccgcctccccgattcaagcgattctcctgcgtcagcctccccagtagctgagactacaggtgcccgccacccatttttgtatttttagtagggacggggtttcgccattttggccaggctggtctcgaactcctcacctcaggtgatccgcccgcctcggcctcccaaagtgctgggattacaggcgtgagccaccatgcccagcctggaaataggaggagagtaatattgcgaggggttggctgtgaaatggtttatctccaggaaggtttccgggaggaagtgattctagctgggcttgtattcagggaccagaatatccactggttctttgccccacagtaatgaatttacttccccacccctatcaggatgcagaaagcctcagtgttgctcttcctggcctgggtctgcttcctcttctacgctggcattgccctcttcaccagtggcttcctgctcacccgtttggagctcaccaaccatagcagctgccaagagcccccaggccctgggtccctgccatgkgggagccaagggaaacctggggcctgctggatggcttcccgattttcgcgggttgtgttggtgctgatagatgctctgcgatttgacttcgcccagccccagcattcacacgtgcctagagagcctcctgtctccctacccttcctgggcaaactaagctccttgcagaggatcctggagattcagccccaccatgcccggctctaccgatctcaggttgaccctcctaccaccaccatgcagcgcctcaaggccctcaccactggctcactgcctacctttattgatgctggtagtaacttcgccagccacgccatagtggaagacaatctcattaagcagctcaccagtgcaggtcagtgtgggccactttgaaggccagaagtaccttggcaaatttcttcaaaatttgaagtcagggagtcagacctttgggtgcccagatrcacacttgattatggtgtagggggacagaggagaagaaagaggccagggccctgctggtagggagctcagtttgggggacagaggagaagaaagaggccagggccctgctggtagggagctcagtttgggagacagaggagaagggatctgggctttgttcctatgaagcttctaatctgaatggagtgtaagttttattcttggagacctctcagtaaaagggagaagggaagaagagaagatgtggatcttggcttgcaagtgtggagaagaaagcagagaaatacaggccctgttcattcactgactgggaagaagcaggatacacccaggaaaaacaactcagtagagatacccagagacagaactaggagagcattttgtaggaaggataagtgtgaggtctgggtggagtacggttatcagggaaagcttcctggtggaaaatgttaggccctgaaggataaggattgctgtatggaattgctgtactttaggttgcatggttgggacttctgatgggtctttaaagggcctcttttcctcttttctcctaaccctgacgtttgctcaggctctgacttctytttcatgtccctgcaggaaggcgtgtagtcttcatgggagatgatacctggaaagaccttttccctggtgctttctccaaagctttcttcttcccatccttcaatgtcagagacctagacacagtggacaatggcatcctggaacacctctaccccaccagtgagcmtggggccagagcacttagttctaagactgggagctggggagaactgctttagtccacaaattctgagccacctatgggtgtaacagcctgggcttgtatccctggacatagaggagtgtcaaagcctggctggggttgaggagtgggtcttagtcttctgtgctcagtgttctccccttcacagtggacagtggtgaatgggacgtgctgattgctcacttcctgggtgtggaccactgtggccacaagcatggccctcaccaccctgaaatggccaagaaacttagccagatggaccaggtgatccagtgagtgtggggtattggctgggggagtgggtttgtgtctgagaatctygaaraagctcttatcttagagcttctttcctggctgaattctstcttctctaggccttctgctgaagctagaggctccatccatcttgattaactcaatgtgtagctttgggcatcaggatcatggccgaagacatgtctctttgcyaaaggtctaggccttactaatggagttatagctggggatgaataggcccctggagaaaaatcttttttctttttgagaaaaatatttatccgtttctactcctgacacatttattggcccccaggggacttgtggagcgtctggagaatgacacactgctggtagtggctggggaccatgggatgaccacaaatggagaccatggaggggacagtgagctggaggtctcagctgctctctttctgtatagccccacagcagtcttccccagcaccccaccagaggtgaggcctgggatgttcctcatctgttctcccagtaatcagcccatgttaccattacagcatcctcatgaatacctctattttaggcccccaaatycatgatcctgggtatcctccactctcatttcttacctaggcccctatgtctgccatcccaaacattgacttcagctttgtgatgaatctgttgaccactgtcattttcctttaggagccagaggtgattcctcaagttagccttgtgcccacgctggccctgctgctgggcctgcccatcccatttgggaatatcggggaagtgatggctgagctattctcagggggtgaggactcccagccccactcctctgctttagcccaagcctcagctctccatctcaatgctcagcaggtaggtragcgggctgggtttccaggtgacagagctagggtgggcatgaaagaagcataatgaaccactcttttgtcctttgactagtcttagtcccaccttccatacctatccctcttccgttatccctcccttccccgattctggacagagtttgggtccttgacttccaggtacccccttttgtaatacctattcttgcctctgccccaatttatgtctctgacctgttccccttggcctctgaccttttctctgccaggtgtcccgatttcttcatacctactcagctgctactcaggaccttcaagctaaggagcttcatcagctgcagaacctcttctccaaggcctctgctgactaccagtggcttctccagagccccaagggggctgaggcgacactgccgactgtgattgctgagctgcagcagttcctgcggggagctcgggccatgtgcatcgagtcttgggctcgtttctctctggtccgcatggcggggggtactgctctcttggctgcttcctgctttatctgcctgctggcmtctcagtgggcaatatccccaggctttccattctgccctctactcctgacacctgtggcctggggcctggttggggccatagcgtatgctggactcctgggaactattgagctgaagctagatctagtgcttctaggggctgtggctgcagtgagctcattcctcccttttctgtggaaagcctgggctggctgggggtccaagaggcccctggcaaccctgtttcccatccctgggcccgtcctgttactcctgctgtttcgcttggctgtgttcttctctgatagttttgttgtagctgaggccagggccacccccttccttttgggctcattcatcctgctcctggttgtccagcttcactgggagggccagctgcttccacctaagctactcacaatgccccgccttggcacttcagccacaacaaaccccccacggcacaatggtgcatatgccctgaggcttggaattgggttgcttttatgtacaaggctagctgggctttttcatcgttgccctgaagagacacctgtttgccactcctctccctggctgagtcctctggcatccatggtgggtggtcgagccaagaatttrtggtatggagcttgtgtggcggcgctggtggccctsttagctgccgtgcgcttgtggcttcgccgctatggtaatctcaagagccccgagccacccatgctctttgtgcgctggggactgcccctaatggcattgggtactgctgcctactgggcattggcgtcgggggcagatgaggctcccccccgtctccgggtcctggtctctggggcatccatggtgctgcctcgggctgtagcagggctggctgcttcagggctcgcgctgctgctctggaagcctgtgacagtgctggtgaaggctggggcaggcgctccaaggaccaggactgtcctcactcccttctcaggcccccccacttctcaagctgacttggattatgtggtccctcaaatctaccgacacatgcaggaggagttccggggccggttagagaggaccaaatctcagggtcccctgactgtggctgcttatcagttggggagtgtctactcagctgctatggtcacagccctcaccctgttggccttcccacttctgctgttgcatgcggagcgcatcagccttgtgttcctgcttctgtttctgcagagcttccttctcctacatctgcttgctgctgggatacccgtcaccacccctggtaaatatctcagctctgattcacttaaagacaatagtgatgtgagttcggcccctcttgttttcaaggaggtgttgctcctyatgttcctgagcttgacagagggtcccatgccccacacaactaggaaggtcttcttggtgtcctctctcttacctgccatagccaagcaaattgatccctcctgttggttcccagggttcatggagaggagagacaaggagtcctctaagactccctgtggaaatgctgcatcctcatgagcacatttcttgattttccagtgatggaagtagtaaattgtgaatatataatggcactgagctgtatgtgtttgagagaaagaaagagattggccatagcaggattcagataagcctgatggcgcttttgtaccacagagagaattagaataacagaatgttgactgtaaggaggttgggctgataggcatktgagtgtgtatgagaattgatactgaagtagtaggagtatatgattgtggagcagtagcctrtggattagggaataagaagtgactgkaacgtggcatatcttttcttccaggtccttttactgtgccatggcaggcagtctcggcttgggccctcatggccacacagaccttctactccacaggccaccagcctgtctttccagccatccattggcatgcagccttcgtgggattcccagagggtcatggctcctgtacttggctgcctgctttgctagtgggagccaacacctttgcctcccacctcctctttgcaggtaccccctcctccttcacttgcttccattgtttactctggctttgtggaaagaaaggaaacccctggatttgaatggagagatatgggtttgttggatctttggcaccccttggcctaggctaattggaacctgagccagccagggtggcctgttgattccagccataccctctcttgaggcagtaggttgcccactgctcctgctctggcctttcctgtgtgagagtcaagggctgcggaagagacagcagcccccagggaatgaagctgatgccagagtcagacccgaggaggaagaggagccactgatggagatgcggctcygggatgcgcctcagcacttctatgcagcactgctgcagctgggcctcaagtacctctttatccttggtattcaggtgggtgtaggagagagatcagggagttggtgttttttctctgtgtgtgcatcactttctttcagaccttcaaaaccgtgggagagagccttgactgagtttcacataagtgaagtggttgcccaagcccagtggcctcaaatggcagttctgagacttgaacctgggtctccttaatcctagtcctggatcatttcccctctacaacctagatctggaccccgctagttgcatttgaggattactctatcagtggacagactggaaaaactgaggtgatagccaggattttcttcccaaactgtggtcatggatcctcttcctttcctccagaggcagatgtggcactgatatcttcctccatcctgggggcacagcctgagtgttagcattgcagatggatactgacttgcccaaagtcacatagtgagtcagtgcttggggcagggcaggaagtaggtctcctaactcctagcccaggacatgcaatattttttccactgacatgcactattctcctgcttccattttttacaggggcctatagaaactctccttttgctcygcttcctcctctccttcacaagtaacgtggcccctcctctcctcctctagattctggcctgtgccttggcagcctccatccttcgcaggcatctyatggtctggaaagtgtttgcccctaagtgagtagatttgcttgagaagtagaggtggtggggagggagaaacttggaacaaagtatgaagatcctaaacatccaggatggccaaggttttgcctctacagggaaaaggcagtagacctactctgttgcctgagattctccgcctttctttgcaggttcatatttgaggctgtgggcttcattgtgagcagcgtgggacttctcctgggcatagctttggtgatgagagtggatggtgctgtgagctcctggttcaggcagctatttctggcccagcagaggtagcctagtctgtgattactggcacttggctacagagagtgctkgagaacagtgtagcctggcctgtacaggtactggatgatctgcaagacaggctcagccatactcttactatcatgcagccaggggccgctgacatctaggacttcattattctataattcaggaccacagtggagtatgatccctaactcctgatttggatgcatctgagggacaaggggggcggtctccgaagtggaataaaataggccgggcgtggtgacttgsacctataatcccagcactttgggaggcagaggtgggaggattgcttggtcccaggagttcaagaccagcctgtggaacataacaagaccccgtctctactatttaaaaaaaagtgtaataaaatgataatataattatgtgtgtctgagatgtgggggagccccactgttctataggggttgtgaggaggatcagtctctcctgccaccaggcacagatgagatcagtcatcttaggaaagcctggctgcacctgagaacctttatgaagtggttggagttgtctgaattcactgcctccacctcttcccaaatcaatcctattatcccaccgctattttcctttgccatgcaacacattttgttaagttcctgttctttgtctgataaagagagaagactgagaagacaagcccaggcatcatgcagcaccgactttaactgtctgaagccccaaatagtgctatgcccccgctccactgggccttttcactatagaacaccctttgcccttcccttctgtggaagcctcccttgtttcccaacctgtgccactctttatcagatctacatgcccatcttatgtagcattccaccttgtcccattcattattcctgacttgaagccaaaattgtgtgaatccactggttcttttctcatgtgtatgttttgtgccctcygttcaccccagcactcctgtcatgtttgaaatgctggcatgaaatcctcctagagatgtccatcaaaagagttgggaagaggccctggagagaagcatcaggactgggatttgaggtttgacagtacctagaacaagaggagctgataccactgaaaaacagaacagatgttaaaaccatgggatagcacctacttttagctggcataaagtagagaagctgagtagtagtggttgtgaagtataaacgttcactgctgtggtaggtagctaagggaagaattgaaattatttttattgttactatcattttaaagacatatttttgctctattgtccaggctggagggcagtggtgcaatcatagctccctgtagtttcaaactcctgggctcaagtgatccatctcagcctcctcagtatctgggaccatgcctggctaatttttaaatttctgtacagacagagtcttgctacattgcccaggctgttcgtgaactcctggcctcaagcgatccttccaccttggcctctcaaagcactaggattacaggtgtgagccacagcacctggctaagttcagattattaatggccagtggtccctagtgttacagatgccaaatagtaagatgatgaaaagtatggttcagctgggtgtggtgcctcatgcctgtaatctcagcactttggggagccaaggcgggtggatcacctgaggtcaggagtttgagaccagcctggccaacatggcaaaaccccatctctactaaaaatacaaaaattagccaggtgtggtggtgtgcacctgtaattccggctactcaggaggctgaggcaggagaatygcttgaacctgggaggcagaggttacagtgagccaagatcacgctactgcactccagcctgggagacagagccagactctctctcaaaaaaaaaaaaaaaaaaaaaagggataggttgttaaccatggtagaaagaggtttaataatgcaagggggtgaagttggccccagctggcctgtaagatgaattagaaaaacgcttctccccaagtctggtggacacaactcccaagcatagttcggtgagcaaatggtgtctttttgagaaaggggaaaaaaaccaaaacaaaaacctttcctccatccctagcacccatggaaggattttaggccctagttcctccacttctcagccaggtaccctgcactttttgcagtagcctccttgcctggagcctaaggctaatttgctgatctgccaaccactgtctattctttctcctggtgtatctataagattctattagataaagacattagtacattgatttacgctattaaaaattatttctagccaggcactgtggcatgtccctatagtcccagctacttgggaggcagaggtgggaggatcacttgaggatagcaagactccgtctctacaaaaataaaaaaattagccaggcatggtcccagctatgtagaggctgaggtggatcacttgagcccaggagttagaggctgtagtgcacaatgaatgcacctgtgaatagccactgcactccagcctgggcaacatagatcctctctcttttaaaaagaaaaattatcttatccctcccttttccttgaaatcagagtccattccacactaactcaatgattctttttttttttcctttaattttttgtagaggtgggggtcttgctgtcttgcctaggctggtcttgaactcctggcctcaagccatcctcctgcctcgacctcctcaagtgttgggattgcaggtgtgagccattgcacccagccctgattcttttttaaaaaagctttattgaaatgcaatttaccataaaatttacccaygtaaggtgtaagatttaatggtttttgtgtatttacagaattgtacaaccatcaccagaatcaattttagaacattttcaccaaccccaaaagaaaatctactgtttagatatcaccctccaatcctccccaacccctggctagcactaatctgctgtttctctatatatttgcccattttggatatttcacagaaatgggatcataataatatgtggtcttttgtgactggcatcttccasttagtataatgttttccggtttcatctatatagcagcacacagcagtacttcattctttttcttttttaaaattgaagtaaaattcatataaaattcaccattttaaagtgtataatttagtggccgttagtacattcacaacgttgtacaattatcatcattatcaattccagaatgttttcattaccccaaaaagaaaccctgtacccttaagcagtcattccttctcttctcccccttaactcctggtaccactaatttgttttctgtctctatagatttgcctgttctggacatttcatataaatgggctcatacagtagtgcctttttctgtcttatcttcctttactcagcctaatgttttcagagttcatctatgttgtagcatgtattggtacttcattcctctttatggccaaataatactctattgcatggatataccacattttgtttatccattcatccattgatagccatttggatttacacattttggttattatgtaatgctgctataaacatttgtgtataagtttttgtttggacatatgttttaatttctcttgagtgtatacctagctgtacactgagcaactgctgggtcataaggtaactctgtttaatcttttaaggaactgccagtttgttttccaaagttgctgtatcgttttacagtcttaccagaagtatatatgggtaacgatttctccacatccatgtcaacacttgttgtcatctgtctttgattctaaccatcctagtgggtgtgaagtaatatctcattgtggttttggtgtgcatttccttaatgattaatgatgctgagctgagcatcttttcttgtgcttactggagaaatgtcccttcagattcttygactatttttaattggattattgttattattattatttttggaccagggtcttgctctgtcacccaggctataatgcagtggygtgatcatggctcactgaagccacagcttcctgggttcaagcagtcctcctgtctcagcttcctgagtaactgggactacaggtgtgcaccaccatggccgactaattttttattttattgtagagacagggccccactatgttgcctaggctggtcttgaactcctgggctcaggcaatcctcctgcttcagcctcccaaagtgctgggattacaggtgtaagccactgtgcctggctagcattctttttacatgctagatacaggtccctgaacagatatatgatatgatatgatatatgatttacaaatgatatatgacttacaaatattttctccactctgtgggttgtcttttcattttcttgataatatcctttaatgcacaaacattctttttttttttttttttttttgagacggagtcttgctctgtcgccaggctggagtacagtggcactatctsggctcactgcaacctccgcctcctgggttcaagtgattctcctgcctcagcctcctgagtagctgggactacaggcgtgcatcaccacgcccagctaatttttgtatttttagtagagacggggtttcaccatgttggacaggatggtctcaatctcttgaccttatgatccgcccgccttggcctcccaaagtgctgggattacaggcatgagccaccgcgcctggcctacacaaaaattcttaattttgagaaagtccagttcatcctgtttttttctttcattgcttatgcttttggtgtcatatgaaataaattattgcaaaatgccacaacttaattttagaacatttctatcatccccccaaaattccctacattgactccctaatcctaccccaggccaatgatctgttttcggkcttttatttatttatttatttatttatttatttagagatggagtttcactctgttgcccaggccggagtgcagtggcgtgatctctgctcactgcagcctctgcctcctgggttcaagtggttctcctgcctcagcctcccaagtagctgggactataggcatgtgccaccacgtccggctaattttttgtatttttagtggagatggggtttcactatgttagccaggctggtctcctgccctctggtgatccgcccacctcagtcccccaaagtgctgggattacaggcatgagcctggcctgttttcaatcttttttttttttttttttttttttgagacagtcttgctctgtcgcccaggctggagtgcagtggcgcgatctcggctcactgcaacctcagcctcctgggttcaagggattctactgcctcggcctcccgagtagctgggattacaggtgtgcaccacgacgcctggctaatttttgtatttttagtagagacggggtttcaccatgttggccaggatggtctcaatctcttgacctcgtgatccgcccaccttggcctcccaaagagctaggattacaggcatgagccactgtacccagcctgttttcaatctttataagtttgtaatcctagcactttggaaggccgaggccagtggattgcctgagctcaggagttcgagaccagcctgggcaacatggtgaaaccccgtctctactaaaatacaaaaaagttagctgggcgtggtggtgtgcacctgtaatcccagttactcgggaggctgaggtaggagaattgcttgaacccaggaggcggaggttgcagtgagccgagattgcgccactgcactccagcccgggcaacagagcgagactccgtctcaaaaaaaaaaaagtttgttggtgcactcttttgccccttttcattgctaaatcattggctttgaccaactgatggacattttgattgttttcagtttttagcyattatgaacatttttagctactatgagtatttgcaacaaatctcagtgtggacgtatgttttcatttctcttgggagtattctttggagtggaattgctgagtcttatggtaaatttgtgattgacttttttttctttttttttttttgagatggagtcttgctctgtcacccaggctggagtgcagtggcggggtcttggctcactgcaagctccacttcctgggttcacgccattctcctgcctcagcctcttgagtagctgggactacaggtgcccgccaccacgcctggctaattttttgtatttttagtagagacggggtttcactgtgttagccaggatggtctcgatctactgacatcgtgattcacctgccttggcctcccaaagtgctgggattacaggaataagccactgcgcccggcctatgattaactttttaagaaactgccaaacttttctgaagtgagtgtactattttatattcccaccagcagtgtatgagggttcctcatacacatcctcaccaacacttggtataatctgtttttattgtagtcattttatgtatgtatgtgtatagtgtttttatttttatttatttatttttgagacagagtctcactctgtcacccaggctggagtgcagtggcatggtctcagctcactgcaacctccgtttcccaggttcaagtgattgtcatgcctcagcctcctgagtagctgggattacaggtgtctgccaccatgcccagctaatttttgtatttgcagtagagacagggttttgccctgttggcttggctggtctcaaactcctggcctcaagtgatccacctgcctcagcctcccaaagtgctgggattaaaggtgtgagccaccacgcccggctgtgtgaagcgtttttttattttttgagacgaagtctcgctgtgtcacctaggctagagttcagtggcaggatctcggctcactgcaacctccaccttccgggttcaagccattctcccacctcagcttcccaggtagctgggattacaggcatgcaccaccatgcctgcctaatttttgtatttttagtagagacgaggtttcaccaagttggccatgctggtcttgaactcctgacctcaagtgatccatccacctcagcctcccaaagtgctgggattacaggcataacatggcccggccctggccatgtttttaactgtgtttctctaatagctaataatgccgagcatctttttatgtgtttcttagccattagtagatcttttttggtaaaatgtctttttttttttttttggtccatcttaaaattgttttttgttttgttttgagacagggtctcactttgttgcccacgctggagtgcagtggctcaatcatggctcactgcagcttcgacatccctgagctcaggtgatcctcccacctaagtttcccgagtagatgggactacaggtgtgtgccaccatgcccagctaatttttgtattttttttgtagaggtggggttttgctatgttgcccaggcaggtcttaaacttctgaggctcaaatgatcctcccacctcagcctcccaaagtgctgggataacaggcatgaaccaccacacccagctaagattgtttttaaaaatctttttcttgagttttgggagtttttatgtgttagggataccagtcccttatgaggtatataattagcaagtagtttctcccactctgtgactgtgacctttctttttttgaggcagggtctcactctgttactcaggctggagggcagtggtgtgatcatggctcactgcaacctggaactcctaggctcaagggctcctcccacctcagcctcccaagtagctgggtctacaggtgtgttattgtgccagggttaatgttttaaattttttgtagagataatgtctctacaaaagacaccatctttgttgcctaggctggtcttgaactcctggcttcagggaatcctccagcctcagcctcccaaagtgctgggattacagcatgagccacatccagcctatgatttttcttcttttcttttcttttcttttyttttttttttgagatggagtctcgctgttgcgcaggctggagtgcagtggggcgatctcggctcactgcaggctctggcccgcggggttcacgcctttctcctgcctcagcctcccgagtagctgggactacaggcgcccgccacatcgcccggctaattttttgtatttttagtagagacggggtttcaccgtgttagccatgatggtctcgatctcctgacctcgtgatccgcccgcctcggtctcccaaagtgctgggatcrcaggcgtgagccacggcgcccggccccagcgtatgacttcttaatgatgtctttgtagtacaagagtttttaattttaataaagttaacttttttttaaattgtacaagcttttagtgctgtgtctaacaacttgttgccaaacccaaggtcataaagctgttctcttacgttttcttttttttttttttttgagacggagtctcactctgtcacccaggctggagtgcaatggcacgatgtcggctcactgcaacctccgccacccgggttcaagcgattcttccgcctcagcctccggggtagctgggattacaggcgcacgacaccacgccctgctaatttttgtatttttgtagagaaggtttcaccatgttagttaggctgctttacgttttcttttagaagttttatatttttggctcttatatttagtttgtgatccattgagttgattttatgtacgtatgtatggtcgcgttcttttctttcctgkcttttttttttttttttttttgcatatggatattcaattctcctagctccatttaatttgaaatgattgggcaggtacttttgagcagtgcaagtacagagcggcactgccagcagactacacgcggtagaaagccgaccttggtgagcgtgttggtgctcgacagtgagcagagaaaggatggacgattacggagcgccctcgtctccagttaccgctttctggaaacaccatccgccggggcggagctgttccgccccggtgcggtactacgactcccagcatgcacctcgcagtcggccctcggtggaagcgggaacccaggaggacctgggggtgtggcagcgaggaagggccgagccacggactgtggggccgaaactcgctcccgcccaccctttctcgaggctgtggcctccgcgrgagccgagcgggccgcaccgccggccgtgcgactgccccagtcagacacgaccccggcttctagcccgcctaagcctgtttggggttgctgactcgtttcctccccgagtttcccgcgggaactaactcttcaagaggaccaaccgcagcccagagcttcgcagacccggccaaccagaggcgaggttgagagcccggcgggccgcggggagagagcgtcccatctgtcctggaaagcctgggcgggtggattgggaccccgagagaagcaggggagctcggcggggtgcagaagtgcccaggcccctccccgctggggttgggagcttgggcaggccagcttcacccttcctaagtccgcttctggtctccgggcccagcctcggccaccatgtcccgccagaccacctytgtgggctccagctgcctggacctgtggagggaaaagaatgaccggctcgttcgacaggccaaggtaacacggttgctggcaccctcggtttgcagcctcaagatccctgaaagcgggtttgcagtggatttaccccaacmgatggggagggactgagcttgaccaaagagccagaaatgactggagaatgcatcccttgccactgctgcaaggggagaaaaaaggattgatcctcagtgacaacccctccctcatgtggcaggtggctcagaactccggtctgactctgaggcgacagcagttggctcaggatgcactggaagggctcagagggctcctccatagtctgcaaggtaggcgggtcctccccaggatggtcagttcccctcttccatagccagagaaacatccgctcctgcgtttttgggatcgatataattactcggggcagggagtcctgtttaaggcacagaggagactggagtggaatcatctttgtacaggcaaatccctctcttccttacacactcacagagtggcatttgaaaaatggtttccaagatggtctgatctggataacttttttgccctttccagactctctgtccaaaggttgggttctttttttaaatccttagctaattggctggagggtrggttctttattgtagctgttttggttggagtggggtgatctctgagttgggattttatttggaggatcttccatgggggagcagtctgtaagaccaacattgttgctccagggctccctgcagctkttcctgttcttcccttggagctgactgtcacctgcaacttcattatcctgagggcaagcttggcccagggtttcacagaggatcaggcccaggatatccagcggagcctagagagaggtgagggccagagattgtccctgattcccctgccatcttcagtctgggtttaagttattgcagggagatgggaggataaacaacatctgtcacctccatggagagaggtgcccttctctgtgctcttcagaccaggttgaggtattattattgtgacctttggggtcctgcaggagaggaaagccagagtgtgtggggagatggaggatgaggtgctacttcagctgtgtgtgtgtctatgtgtgtgtgtatactctacagtgctgkagacacaggagcagcaggggcccaggttggaacaggggctcagggagctgtgggactctgtccttcgtgcttcctgccttctgccggagctgctgtctgccctgcaccgcctggttggcctgcaggctgccctctggttgagtgctgaccgtcttggggacctggccttgttactagagaccctgaatggcagccaggtaatagggaaagtgacctgaagctgagggtctcctcyttccttcctcctcctttctctccagctgcagtagcatcatcatgtactggacaggcggctgggttggtggtcggaaaacctggattctctctgggactcttgggtgaccttgccctggttggtctctcattgtggggattctcttaggagtgttttttaaaaattggacaggcatggtggctcatacctgtaatctcagcactttgggaggctgaggtaggaggatcacttgaacccaagaggtggaggcaacagtgagttgtgagctatgatcacgccactgcactccagccctgcagcctgggtgacagagggagaccctgtctcaaaaaaaaaaaaaatttttttttggatagggatagggctcttgtgatcttgctcaagtcagctctcagccttagtctccttattagtaactcaaatatggtccttgccctgagtgaggaggcacgctggaatagatcatcactgccccaggtttttcttccttttttttaattcttgcctcatagctatctatctcttagaattgggggaaactacaggcattatgcatagcttcttgctttgtaagggtagctgaggcctgtgtcctcaaggatcaagaggacccttgagctcaaggtctagccaggatagatggagataggagaagacgrggaggttgtaggcttggagcttctggttgtccttctttccccagagtggagcctctaaggatctgctgttacttctgaaaacttggagtcccccagctkaggaatkagatgctccattgaccctgcaggatgcccagggattgaaggatgtcctcctgacagcatttgcctaccgccaaggtcagctagcarcctgactcatctcttctacctttaagtggtcctccagactcatgcyctctctcttgtcccattcagttccatgggcttcttagacccttgttccccatcatgacccctgctctatagccctctccaagctcacaccctgactgtcctcaggtctcyaggagctgatcacagggaacccagacaaggcactaagcagccttcatgaagcggcctcaggcctgtgtccacggcctgtgttggtccaggtgtayacagcactggggtcctgtcaccgtaagatggtaaagacagtcctagggtggattggggaaaccacaagcattatgtatagctttttgctttgtaagggtagctgaggcccgtgtcctcctatccctttagggaaatccacagagagcactgttgtacttggttgcagccctgaaagagggatcagcctggggtcctccacttctggaggcctctaggctctatcagcaactgggggacacaayagcagagctggagagtctggagctgctagttgaggtagggaactgccaggtgaagatgtggggtggaggattcctgaggtgcttgtgatggggtgacttgactagtcaagatccaagtataaggaagtatggctcccaaagattatagatacaatttttttctttctcttttaggccttgaatgtcccatgcagttccaaagccccgcagtttctcattgaggtagaattactactgccaccacctgacctagcctcaccccttcattgtggcactcagagccagaccaagcacatactagcaagcaggtgcctayagacggggaggtgaggttccccttgctcacctgagcttctcttcccacttctgatgcctcccctggggtgtgactctgcttttgttcttgtgacttgggggatgaatgaggcagtggcaggacataggtcgccactcctcagcctcttaccttgcttctagacctgaactgaggactcttctctaagacattaaccttctctatctttgacactctgaagtctcttccccagtccattctgtaactggggtagatccatactgagccaaaattggagccctaagaccttccctccctttctcctcctcagggcccatgaacatccatctgttagctaagagagaacattctcaggacccttgcaggttccctgctagggcctagggtgaggcttatgggcttttactcctcagggcaggagacgctgcagagcattacttggacctgctggccctgttgctggatagctyggagccaagggtgggtgtgtcttcaagcttctctgcaatggggtagacgggttggtgtcccctttgaaatacagcaagactgcaattttttgttttttcctctattctgtctgtccagtctgggggcccaggactctgcatggtaccagagcctggtgaagaggttggggatggtggctcatgcctttcaagacactgcttcttcttcccactccagttctccccacccccctcccctccagggccctgtatgcctgaggtgtttttggaggcagcggtagcactgatccaggcaggcagagcccaagatgccttgactctatgtgaggagttgctcagccgcacatcatctctgctacccaagatgtcccggctgtgggaagatgccagaaaaggaaccaaggaactgccatactgcccactctgggtctctgccacccacctgcttcagggccaggcctgggttcaactgggtgcccaaaaagtggcaattagtgaatttagcaggtgagcccggggtcctagagggggtgtggagggatgattttctgattgggacctgagttggtgagctccatgttcacctacttaccctagagtttctgaaattgattcctcttcacccctgttctgtgtcctacttcaggtgcctcgagctgctcttccgggccacacctgaggaaaaagaacaaggtgatctaaactttcagttttcctcttacctcctggaagtggtagtggtggaagtgggttccctttaatgtgtcccagcccaccaggagacttaagagaaagggactgtggacacaagaagaaatagaggaggatttggggttttggtgactgtgaggctgggaagacacttcttgactttgggagtggtccccaggggcagctttcaactgtgagcagggatgtaagtcagatgcggcactgcagcagcttcgggcagccgccctaattagtcgtgractggaatgggtagccagcggccaggataccaaagccttacaggacttcctcctcagtgtgcagatgtgcccaggtatgtrtacttgcatgacgtcggctatgcatagatgtgcaaggacagagaggcccatgggaaatacttgggcgtaagtgtaagagtggtgttctcagacaggaggggtgattggggttgtgctatatatacctagggatatatccaggtgttcaaatatacacagtgtrtatgcagggctcccaagagttccctggtttccccgatatcctcagacacaaagaccatgactctgctgttgtgsgttgcacaggagtagggggcagatgatggacactgggatgggaatggttgtgaatgatctgcccccgcttccatatgtgagtgtaggcaagatacttcctctctctaggcctcagtttccctttttataaaacaatgcctaagactatgtcaagttctaagactctgtactctgggctggggctacaggtaatygagacacttactttcacctgcttcagactctgaagaggctagatcggagggatgaggccactgcactctggtrgaggctggaggcccaaactaaggggtcacatgaagatgctctgtggtgaggctcaggcctgctggcttggggctgaggggcagttggtgtcctagagtccttggacctattgtgggtggtgaacactgaaagcgggggtatggctgcccagctttctgccaatctttcacccttaggcatcatccttctttctctccaggtctctccccctgtacctagaaagctatttgagctggatccgtccctctgatcgtgacgccttccttgaagaatttcggacatctctgccaaagtcttgtgacctgtagctgccacgttttgaagagcttgagctgggtccccagtgggctgtctctctgtggggagggctttctgcttcaccatcattaggaatgtgaccattcctatataattcctggactggtgagattggtggtaggcctgtgaaatttgccctagttactaccattctcgttttggaggaaacaatctctgccaccaccaagtcattgactttgctcgaggcaccttttttcctgtttctccttttctgttgtcgagtaaaatttcatatttatctcgtctgcctactacatatacttgcgtgggaaggcttgtgaccgtctagttgagtgctagttgtctatgatgccctttcctgacatcgtctaccttatgaacttgaagtctgggtatgaggaaagggctacaggaatcctcactttggaggcagtggctttagtccttcacattgcctgaatgcagagccccaaagcccaggacagtgacaatgagtggagttgggtctgaagggtggtctagataggcctctcaggacaagggcaggtacctgttacttagagacaggcaggtttctctcagagtaactcttcactcccttcctaattccaaattctagaaattcgactcgtcttagtcaaatgtgtctgtgtgggtacagggtgaaaggtgaattgagtcagcatatcaccaacagctgcctgttgactactaacagggacccctgttatttggggcccaaggattttcaagtcccagcatatgcagttttcttgctaatttgggttctactgaattggctgtgtgttctgtggttgccctttgacttctctggatttgagtgccttattataaggtattaatattaatgacgggaggaagaaaggcacaagcgctgagaaactgcaaaggctgtgggattggggttaccagagggtgcagtgacaatggggtaggagtggggtgctagtcagaaagttcagagtaggggtggttggaggcagcgttgagaaggagcaagaagtgtcagggtggtgatggcgtcttagaagatctccaggttttgggagaagatgggtgtatgggttaccacaataggactagactaatacaagggttcagtctattgtgccacgttcttccaggaggataaactccggagccaatgaactggagccaagtgggagagtccgcctctaagggattaaagggtctcctttcactaatcgatctcgccctattcctttcgttgattggctgagaattccaatccgtcgaggaagcgtagcgttgcggccaattgacgtggcgttactaggcgtgtcgcatcactgaggcgggagccaggccgcaagcgaatttcctgattggctgtgatctgcgggttgctggggagaggcscggagaggcgggcgagagtccgcagggcaggcgctgattggctgaggtgggagcagcttcccttccgatgattcggctcttctcggctcagtctcagcgaagcgtctgcgaccgtcgtttgagtcgtcgctgccgctgccgctgccrctgccactgccacctcgcggatcaggagccagcgttgttcgcccgacgcctcgctgccggtgggaggaagcgagagggaagccgcttgcgggtttgtcgccgctgctcgcccaccgcctggaagagccgagccccggcccagtcggtcgcttgccaccgctcgtagccgttacccgcgggccgccacagccgccggccgggagaggcgcgcgccatggcttctggagccgagtgagtgtgcgcgcgccgttcgcttgctgcggcggcgcgcaccgggaccagccgcgcagggtaggcccggcggggcctggccgtgggcgcgtcagagaggtggagaccaggaaagagggaagggaagctagggggcgagtgaggggccgtggacccggcaggcccggctggggccagctgcgcacccgcgcgccccctaggcggggcttgcgttgggtccgggtcggagcctgggccggatcgtgctgtgtcatgcaggccccggcccgcccgattggctcccttagaacggacgtctgggcctggccaggtcttccggcccactccgccggsgcggcgccccggggctttggggcgccagtctgccgtccggcctaccacccgccgaaagcctttggtccccggagagagcaggccccgcgagcccgaggccccagccgggcccggtgggcgtggactttgcgccatgtgaaggcctcaggagctctgccaccgaggcggagcccggggtcggggaaggcccgccgagctcagggaagctcacagccgcctttttggagccgggtcggcggggccggaggtgggcatcctctgtgtgtgacctgagtcgtgaaggactgttagggagagggcgagccctacctttcgcttctggtcttcttactttaggcctgttgttcatactagaaagtttgagccagttttccttaatgttatgactcgtgggtggggagaaaggaatttttctttaacattttaggttcttgctaaagttggaatctcagttcgtgttttgtgcgcctttccagatttccaggtttcgtggtgtgcagtttagagttgcactaactcttcaaaaacacaaacgtgcgcgcactcctttccccaaccagctatattgagaaattacccgggctctggggctttctgaccccacctccatccttaggaaagcgttagataaaacttggctacctcagcccattcaatttagaatagagagcttttagaggcaaaaaaaaaaaaaaaaaaaaaacacagccagcccaaggaaactctatgcaaattaccttccttccttgaagagattagttttttgaggtgtgttcctttttctcaagtttctgaattcggataaagtattactcagttgcttatttaaaagagtcacttattctgaaagtattcttttggtttatatgcagtcagcctcttattttcaaaagtaaaaatctraaattcttggaacctggcatcatcagctgtttctaacctcttggtcaccttgatgactcttagctgaaacccttccaagtcccgtggagtcccctgtgcagttctggaaagggattgacttatacagaagacaatggaggattgccccaaagagtgtccagaactgctgttggcccatggtcaggccaaattcagtcttttagagattaccacatctgatctcagtaggtagatggggaattagaggctttaccttaagaaaagggcataccactcatctccagagccagagtccgggatggtaggcagaatggaggttttcctaggatacagctttgagattaaaatacaaactattgaccgggcacagtggctcaggcctgtaatcccagcattttgggaggccgaggcaggcagatcacttgaggtcaggagtttgagaccagcccgggcaacatggagaaaccccatctctattaaaatgcaaaaagtagccaggcatggtgatggtgcacacctgtagtcccagccactctggaggctgagacaggagaatcacttgaacccagggaggcagagattgcagtgagggagatcgcgccactgcactccagcctgggcaacagagggagactccgtttcaaaaaataaaaaactatggtgactagaggcatctggcgttttatttttctccagtcccagttctataagtcaagcaagaagatgggcagtccctggaagagtattttgatgggacaggagtgggagagctcgtgggtttacattgctctcaactgtcacattgagcatgcttggcctctagtgtgttgataagcattggaagagtctgcctactcagcagcattgtgcctggagtggcagacttttggaatgggggaagcaaatttgagcagaggaaactgtcgttagaaactagtttagaggcagtggttaaaaatgcagcctatgtgtgagggttagcagaaggcctaccattttgttagatgaatggggtttgtttttctcttgggtgtatcaggacccaaagatgtaagaaccccatggcttcctagctgagcacagcatttttctttgtctcttgcaaattgtgaggatatttccaatgggaatactattttgtcttgttttgttgacttcagtatccccagcccttagaacaatgcctggtacataatagagactcatgaatttgttgaatgaagaaattcgttttaaaaatttattttctttgcttccttcattgtctggccttcctactttggttaatgcttatgttttcctgagccttactaacacgaggccgctcttaaaaaagagagagcgctgggtgctgtggctcacgcctgtaatcccagtactttgggaggccgaggtgggcagatcacctgaggtcaggagttcgagaccagcctgaccaccatggtgaaaccccatctctagtaaaaatgcaaaattagccagttgtggtggcgcatgcctgtaatcccagctactcgggaggctgaggcaggagaatcacttgaacccgggaggtggaggttgcagttagctgagatcgcagcattgcattccagcctggacaacaaaagcgaaactccatctcaaaaaaaaaaaaaaaaaaaaaaaaagggagagggagcttgctgagtctagtaagtgacagctggaaacgggctaggtaataagttggtgtcactgtctggtgaatgatcctagcttctaggaaataacactgagtgtagacccagtcgactttgatttgggtgagagggatttggatttgccccatgtctcagcatttcttggttttgattttttgagccaactttatggaattgtgtacttttgcagatattactgtgaagttccttttgaccttgagcctctttctggcggtttgatgtctgttagtgttttttccaaatatgatggtctttatgcttggcattcctttggtactatggaatgccctggcatcagtaggtttagcctataaggagggtagcaccaatgattctgcttcgttgtccccaggcttgcttggtagaacttaaggcctccctgagcctcaagggaggttgtctggcttacttaattccctggaaagttagcttatgctttactctatactgttaatcatggtgaccattaataccatgtgccaggtattatgttaagcattttacattcattatctcccttaagacaataagcctctgagataagtattatattccttcttttatagaggaggacatcaaagttcagaggttaggtaacttgcccaagatcacaattaagcagtggcataattggaattcagacccaatgggtctgactatagagttcctgctcttaaccactcttctgtaagtctaagactatttttatttctctaacaactattcagcctccatttctattatgtcttcttcttaggccattattttctgaccctggggcaggatcactcacttggggccttatagctgggacactgacgctcaaaataccaggagctgctggaatgggtattgtaatatgtatggtagatactgctcctcgtgaccttggctgcctttccttcatctgagctttctggtctagggacagcttcatctattcactgtttctttcctaagtatgagttttagagactggcgaggcgcttggggcaggagtatctactgactccatttcctcctyctagttcaaaaggtgatgacctatcaacagccattctcaaacagaagaaccgtcccaatcggttaattgttgatgaagccatcaatgaggacaacagtgtggtgtccttgtcccaggtaagctgtggccacagactagtctttccttactgcacttacttgagggattttcccaggtttcttttctcatttttcttgcagtgactgcagatagagtggggtttactgggaatcccaatctccagggctgctgcttactccccgtcagcccaatgacccaaaggccttaactttctttcctcagcccaagatggatgaattgcagttgttccgaggtgacacagtgttgctgaaaggaaagaagagacgagaagctgtttgcatcgtcctttctgatgatacttgttctgatgagaagattcggatgaatagagttgttcggaataaccttcgtgtacgcctaggggatgtcatcaggtgtgtgtggggtttttggcttcacagggatgggaggccagagatagcctgcattacaggcaggacccatgtattacaggcaggaccaagttcttggcacctgtcgatgcaggaagcctcctggtcatgggaagacttatgcttcagggttgtctttaggttttggttctgcctccctgggacttcaaaatccatttctgcaggtcccttgagacaaattggcgttcctgtaactttcttgatggctttattttttcctactagaggtgtaatttatcatacttatatcctggcttaggataccactcgagggtgtgtatgtatatgccaaataatctcctcactactctcactagtatgtctaattgatggcttgtgttggggttggaatgaggtgggggtatgggcatggaaggtgagctgctagcaggtcttttaagcccctaagttaacccgggagagaggaatagttggagccagacctgggatagctctcaatgtgagtgattttgcttgttcttgcataattttaggcaagaggttaccccatcttggagtcatctctagccactcctacccaaccaaccatcacctggccaggatcatctcaggcttttgattcttttgaatggagtctaagtttcatgtagctttcttcttgggagtgcttagtcacttcctcaaggtgttctgaccacctggctgagataattttgtttttttcacttctgtttcactgaccctgacaattgttagcttaagaccttcccttgtaatattgggtcaccagtattagctagaaggggatcatccttggatatctccctgaagaccctgcatgtctttgtggggtttctaaatgtgtggctcttgattttggctcactgattaggagtgagtggggctgttccttcgccctcacttccaccctgttctccttcctctcttcgcctaaagccatcctgccttttctttttcacttactatcagctatctgtgccaggcccttttggacacccagtgcttgggcccgaagtgtggttggtaatatggagtctgcttgtcatcctcagcatccagccatgccctgatgtgaagtacggcaaacgtatccatgtgctgcccattgatgacacagtggaaggcattactggtaatctcttcgaggtataccttaagccgtacttcctggaagcgtatcgacccatccggaaaggtgagagctaattctgagcttaaggattattgactgtagggaataaaccttggaacatctttatctcattttctttttcttttttttttttttaaatcttttatgcttttcccctgtatttatttattcattttttaagagatggggtcagctgggcaccgtggctcacacctataatcccagcaatttgggaggctgaggcgggtggatcacttgaggccaggagtttgagaccagcctggccaacatggcgaaaccccatcgtgggcacctgtaatcccagctacctgggaggctgaggcatgagaattgcttgaacccaagaggtggaggttgcagtgagccaagattgggccacagtactgcagcctgggtgacagagcaagactctgtctcaaaaaaaaaaaaaagagacagggtctcactatgatgcccaggctggtctcaaactgctgggctcaagtgatccatctgccatggcctcccaaagtgctgggattacaggcatgagccatcaagcctagtctcattttcttttcttttttttttgagacagagtgtcgcgctgtcccccaggctggagcgcagtggtgcaatctcggctcactgcaacctccgcctcctgggttcaagcaattctcctgcctcagcctcccaagtagctgggattacaggcgtctgccaccacgcccggctaatttttgtgtttttagtagagacggggtttcaccatgttggtcaggctcgtctcgaactcttgacctcaggtgagccactgtgcccggccgctagactcattttcatatatttgtatacacacacatgcaaaccctgcacacatattcatatgtcttaccctctttttttcctccatccttcctttgctccatctctccccttctctgttccaggagagtaagctatctttatggatctctgaaggagaaagtggtccattttggctgggtcagggtccagagtgcacagttctaccattggtggttgtagtgaaaacttgggctacctatatggcagaagtcagaacttgatgggcttctgacatgtcaggttttgttcactgacctcttgtcagagggactcttcacagtttacctttctcatcttgcctgctgcttattaagacaggtggggtggagttggggagaggtagggcaatatctaatgaagggcactatctaatgagcttggcattttgaccccagggtctgatgagttctcactttgtcttgtagttgacacctctaactgtgcttgtactgtttgctctcgcaggagacatttttcttgtccgtggtgggatgcgtgctgtggagttcaaagtggtggaaacagatcctagcccttattgcattgttgctccagacacagtgat
